(19) United States
(12) Patent Application Publication
(10) Pub. No.: US 2016/0333414 A1
(43) Pub. Date: Nov. 17, 2016

(54) IDENTIFICATION OF PATIENTS IN NEED OF PD-L1 INHIBITOR COTHERAPY

(71) Applicant: HOFFMANN-LA ROCHE INC., Little Falls, NJ (US)

(72) Inventors: Anton BELOUSOV, Penzberg (DE); Giampaolo BIANCHINI, Bergamo (IT); Luca GIANNI, Milano (IT); Marlene THOMAS, Rheinfelden (DE)

(73) Assignee: HOFFMANN-LA ROCHE INC., Little Falls, NJ (US)

(21) Appl. No.: 14/720,643

(22) Filed: May 22, 2015

Related U.S. Application Data
(63) Continuation of application No. PCT/EP2013/075162, filed on Nov. 29, 2013.

(30) Foreign Application Priority Data
Nov. 30, 2012 (EP) 12195182.6
Dec. 7, 2012 (EP) 12196177.5

(51) Int. Cl. C12Q 1/68; G01N 33/68; G01N 33/574; G01N 33/74; A61K 39/395; A61K 31/337

(52) U.S. Cl. CPC C12Q 1/6886; A61K 39/39558; A61K 31/337; G01N 33/57415; G01N 33/743; G01N 33/6866; G01N 33/6872; A61K 2039/505

(57) ABSTRACT

The present invention relates to means and methods for determining whether a patient is in need of a PD-L1 inhibitor cotherapy. A patient is determined to be in need of the PD-L1 inhibitor cotherapy if a low or absent ER expression level and an expression level of programmed death ligand 1 (PD-L1) that is increased in comparison to a control is measured in vitro in a sample from the patient. The patient is undergoing therapy comprising a modulator of the HER2/neu (ErbB2) signaling pathway (like Trastuzumab) and a chemotherapeutic agent (like dodetaxel) or such a therapy is contemplated for the patient. Also provided herein are means and methods for treating a cancer in a cancer patient for whom therapy comprising a modulator of the HER2/neu (ErbB2) signaling pathway (like Trastuzumab) and a chemotherapeutic agent (like dodetaxel) is contemplated, wherein the patient is to receive PD-L1 inhibitor cotherapy.

### SEQUENCE LISTING

[0001] The instant application contains a Sequence Listing submitted via EFS-Web and hereby incorporated by reference in its entirety. Said ASCII copy, created on Aug. 3, 2015, is named P31286-US-SubSeqList.txt, and is 782,571 bytes in size.

[0002] The present invention relates to means and methods for determining whether a patient is in need of a PD-L1 inhibitor cotherapy. A patient is determined to be in need of the PD-L1 inhibitor cotherapy if a low or absent ER expression level and an expression level of programmed death ligand 1 (PD-L1) that is increased in comparison to a control is measured in vitro in a sample from the patient. The patient is undergoing therapy comprising a modulator of the HER2/neu (ErbB2) signaling pathway (like Trastuzumab) and a chemotherapeutic agent (like dodetaxel) or such a therapy is contemplated for the patient. Also provided herein are means and methods for treating a cancer in a cancer patient for whom therapy comprising a modulator of the HER2/neu (ErbB2) signaling pathway (like Trastuzumab) and a chemotherapeutic agent (like dodetaxel) is contemplated, wherein the patient is to receive PD-L1 inhibitor cotherapy.

[0003] The HER family of receptor tyrosine kinases are important mediators of cell growth, differentiation and survival. The receptor family includes four distinct members including epidermal growth factor receptor (EGFR, ErbB1, or HER1), HER2 (ErbB2 or p185^{neu}), HER3 (ErbB3) and HER4 (ErbB4 or tyro2).

[0004] EGFR, encoded by the erbB1 gene, has been causally implicated in human malignancy. In particular, increased expression of EGFR has been observed in breast, bladder, lung, head, neck and stomach cancer as well as glioblastomas. Increased EGFR receptor expression is often associated with increased production of the EGFR ligand, transforming growth factor alpha (TGF-α), by the same tumor cells resulting in receptor activation by an autocrine stimulatory pathway. Baselga and Mendelsohn Pharmac. Ther. 64:127-154 (1994). Monoclonal antibodies directed against the EGFR or its ligands, TGF-α and EGF, have been evaluated as therapeutic agents in the treatment of such malignancies. See, e.g., Baselga and Mendelsohn., supra; Masui et al. Cancer Research 44:1002-1007 (1984); and Wu et al. J. Clin. Invest. 95:1897-1905 (1995).

[0005] The second member of the HER family, p185^{neu}, was originally identified as the product of the transforming gene from neuroblastomas of chemically treated rats. The activated form of the neu proto-oncogene results from a point mutation (valine to glutamic acid) in the transmembrane region of the encoded protein. Amplification of the human homolog of neu is observed in breast and ovarian cancers and correlates with a poor prognosis (Slamon et al., Science, 235:177-182 (1987); Slamon et al., Science, 244:707-712 (1989); and U.S. Pat. No. 4,968,603). To date, no point mutation analogous to that in the neu proto-oncogene has been reported for human tumors. Overexpression of HER2 (frequently but not uniformly due to gene amplification) has also been observed in other carcinomas including carcinomas of the stomach, endometrium, salivary gland, lung, kidney, colon, thyroid, pancreas and bladder. See, among others, King et al., Science, 229:974 (1985); Yokota et al., Lancet: 1:765-767 (1986); Fukushige et al., Mol Cell Biol., 6:955-958 (1986); Guerin et al., Oncogene Res., 3:21-31 (1988); Cohen et al., Oncogene, 4:81-88 (1989); Yonemura et al., Cancer Res., 51:1034 (1991); Borst et al., Gynecol. Oncol., 38:364 (1990); Weiner et al., Cancer Res., 50:421-425 (1990); Kern et al., Cancer Res., 50:5184 (1990); Park et al., Cancer Res., 49:6605 (1989); Zhau et al., Mol. Carcinog., 3:254-257 (1990); Aasland et al. Br. J. Cancer 57:358-363 (1988); Williams et al. Pathobiology 59:46-52 (1991); and McCann et al., Cancer, 65:88-92 (1990). HER2 may be overexpressed in prostate cancer (Gu et al. Cancer Lett. 99:185-9 (1996); Ross et al. Hum. Pathol. 28:827-33 (1997); Ross et al. Cancer 79:2162-70 (1997); and Sadasivan et al. J. Urol. 150:126-31 (1993)).

[0006] Antibodies directed against the rat p185^{neu} and human HER2 protein products have been described. Drebin and colleagues have raised antibodies against the rat neu gene product, p185^{neu} See, for example, Drebin et al., Cell 41:695-706 (1985); Myers et al., Meth. Enzym. 198:277-290 (1991); and WO94/22478. Drebin et al. Oncogene 2:273-277 (1988) report that mixtures of antibodies reactive with two distinct regions of p185^{neu} result in synergistic anti-tumor effects on neu-transformed NIH-3T3 cells implanted into nude mice. See also U.S. Pat. No. 5,824,311 issued Oct. 20, 1998.

[0007] Hudziak et al., Mol. Cell. Biol. 9(3):1165-1172 (1989) describe the generation of a panel of HER2 antibodies which were characterized using the human breast tumor cell line SK-BR-3. Relative cell proliferation of the SK-BR-3 cells following exposure to the antibodies was determined by crystal violet staining of the monolayers after 72 hours. Using this assay, maximum inhibition was obtained with the antibody called 4D5 which inhibited cellular proliferation by 56%. Other antibodies in the panel reduced cellular proliferation to a lesser extent in this assay. The antibody 4D5 was further found to sensitize HER2-overexpressing breast tumor cell lines to the cytotoxic effects of TNF-α. See also U.S. Pat. No. 5,677,171 issued Oct. 14, 1997. The HER2 antibodies discussed in Hudziak et al. are further characterized in Fendly et al. Cancer Research 50:1550-1558 (1990); Kotts et al. In Vitro 26(3):59A (1990); Sarup et al. Growth Regulation 1:72-82 (1991); Shepard et al. J. Clin. Immunol. 11(3):117-127 (1991); Kumar et al. Mol. Cell. Biol. 11(2):979-986 (1991); Lewis et al. Cancer Immunol. Immunother. 37:255-263 (1993); Pietras et al. Oncogene 9:1829-1838 (1994); Vitetta et al. Cancer Research 54:5301-5309 (1994); Sliwkowski et al. J. Biol. Chem. 269(20):14661-14665 (1994); Scott et al. J. Biol. Chem. 266:14300-5 (1991); D'souza et al. Proc. Natl. Acad. Sci. 91:7202-7206 (1994); Lewis et al. Cancer Research 56:1457-1465 (1996); and Schaefer et al. Oncogene 15:1385-1394 (1997).

[0008] A recombinant humanized version of the murine HER2 antibody 4D5 (huMAb4D5-8, rhuMAb HER2, Trastuzumab or Herceptin™; U.S. Pat. No. 5,821,337) is clinically active in patients with HER2-overexpressing metastatic breast cancers that have received extensive prior anti-cancer therapy (Baselga et al., J. Clin. Oncol. 14:737-744 (1996)). Trastuzumab received marketing approval from the Food and Drug Administration Sep. 25, 1998 for the treatment of patients with metastatic breast cancer whose tumors overexpress the HER2 protein.

[0009] Humanized anti-ErbB2 antibodies include huMAb4D5-1, huMAb4D5-2, huMAb4D5-3, huMAb4D5-4, huMAb4D5-5, huMAb4D5-6, huMAb4D5-7 and huMAb4D5-8 (HERCEPTIN) as described in Table 3 of U.S. Pat. No. 5,821,337 expressly incorporated herein by reference; humanized 520C9 (W0 93/21319) and humanized 2C4 antibodies as described in WO 01/000245 expressly incorporated herein by reference.

[0010] Pertuzumab (see e.g. WO 01/000245) is the first of a new class of agents known as HER dimerization inhibitors (HDIs). Pertuzumab binds to HER2 at its dimerization domain, thereby inhibiting its ability to form active dimer receptor complexes and thus blocking the downstream signal cascade that ultimately results in cell growth and division (see Franklin, M. C., Cancer Cell 5 (2004) 317-328). Pertuzumab is a fully humanized recombinant monoclonal antibody directed against the extracellular domain of HER2. Binding of Pertuzumab to the HER2 on human epithelial cells prevents HER2 from forming complexes with other members of the HER family (including EGFR, HER3, HER4) and probably also HER2 homodimerization. By blocking complex formation, Pertuzumab prevents the growth stimulatory effects and cell survival signals activated by ligands of HER1, HER3 and HER4 (e.g. EGF, TGFalpha, amphiregulin, and the heregulins). Another name for Pertuzumab is 2C4. Pertuzumab is a fully humanized recombinant monoclonal antibody based on the human IgG1(K) framework sequences. The structure of Pertuzumab consists of two heavy chains (449 residues) and two light chains (214 residues). Compared to Trastuzumab (Herceptin®), Pertuzumab has 12 amino acid differences in the light chain and 29 amino acid differences in the IgG1 heavy chain.

[0011] Other HER2 antibodies with various properties have been described in Tagliabue et al. Int. J. Cancer 47:933-937 (1991); McKenzie et al. Oncogene 4:543-548 (1989); Maier et al. Cancer Res. 51:5361-5369 (1991); Bacus et al. Molecular Carcinogenesis 3:350-362 (1990); Stancovski et al. PNAS (USA) 88:8691-8695 (1991); Bacus et al. Cancer Research 52:2580-2589 (1992); Xu et al. Int. J. Cancer 53:401-408 (1993); WO94/00136; Kasprzyk et al. Cancer Research 52:2771-2776 (1992); Hancock et al. Cancer Res. 51:4575-4580 (1991); Shawver et al. Cancer Res. 54:1367-1373 (1994); Arteaga et al. Cancer Res. 54:3758-3765 (1994); Harwerth et al. J. Biol. Chem. 267:15160-15167 (1992); U.S. Pat. No. 5,783,186; and Klapper et al. Oncogene 14:2099-2109 (1997).

[0012] Homology screening has resulted in the identification of two other HER receptor family members; HER3 (U.S. Pat. Nos. 5,183,884 and 5,480,968 as well as Kraus et al. PNAS (USA) 86:9193-9197 (1989)) and HER4 (EP Pat. Appln. No 599,274; Plowman et al., Proc. Natl. Acad. Sci. USA, 90:1746-1750 (1993); and Plowman et al., Nature, 366:473-475 (1993)). Both of these receptors display increased expression on at least some breast cancer cell lines.

[0013] The HER receptors are generally found in various combinations in cells and heterodimerization is thought to increase the diversity of cellular responses to a variety of HER ligands (Earp et al. Breast Cancer Research and Treatment 35: 115-132 (1995)). EGFR is bound by six different ligands; epidermal growth factor (EGF), transforming growth factor alpha (TGF-α), amphiregulin, heparin binding epidermal growth factor (HB-EGF), betacellulin and epiregulin (Groenen et al. Growth Factors 11:235-257 (1994)). A family of heregulin proteins resulting from alternative splicing of a single gene are ligands for HER3 and HER4. The heregulin family includes alpha, beta and gamma heregulins (Holmes et al., Science, 256:1205-1210 (1992); U.S. Pat. No. 5,641,869; and Schaefer et al. Oncogene 15:1385-1394 (1997)); neu differentiation factors (NDFs), glial growth factors (GGFs); acetylcholine receptor inducing activity (ARIA); and sensory and motor neuron derived factor (SMDF). For a review, see Groenen et al. Growth Factors 11:235-257 (1994); Lemke, G. Molec. & Cell. Neurosci. 7:247-262 (1996) and Lee et al. Pharm. Rev. 47:51-85 (1995). Recently three additional HER ligands were identified; neuregulin-2 (NRG-2) which is reported to bind either HER3 or HER4 (Chang et al. Nature 387 509-512 (1997); and Carraway et at Nature 387:512-516 (1997)); neuregulin-3 which binds HER4 (Zhang et al. PNAS (USA) 94(18):9562-7 (1997)); and neuregulin-4 which binds HER4 (Harari et al. Oncogene 18:2681-89 (1999)) HB-EGF, betacellulin and epiregulin also bind to HER4.

[0014] While EGF and TGFα do not bind HER2, EGF stimulates EGFR and HER2 to form a heterodimer, which activates EGFR and results in transphosphorylation of HER2 in the heterodimer. Dimerization and/or transphosphorylation appears to activate the HER2 tyrosine kinase. See Earp et al., supra. Likewise, when HER3 is co-expressed with HER2, an active signaling complex is formed and antibodies directed against HER2 are capable of disrupting this complex (Sliwkowski et al., J. Biol. Chem., 269(20):14661-14665 (1994)). Additionally, the affinity of HER3 for heregulin (HRG) is increased to a higher affinity state when co-expressed with HER2. See also, Levi et al., Journal of Neuroscience 15: 1329-1340 (1995); Morrissey et al., Proc. Natl. Acad. Sci. USA 92: 1431-1435 (1995); and Lewis et al., Cancer Res., 56:1457-1465 (1996) with respect to the HER2-HER3 protein complex. HER4, like HER3, forms an active signaling complex with HER2 (Carraway and Cantley, Cell 78:5-8 (1994)).

[0015] Also antibody variant compositions are described in the art. U.S. Pat. No. 6,339,142 describes a HER2 antibody composition comprising a mixture of anti-HER2 antibody and one or more acidic variants thereof, wherein the amount of the acidic variant(s) is less than about 25%. Trastuzumab is the exemplified HER2 antibody. Reid et al. Poster presented at Well Characterized Biotech Pharmaceuticals conference (January, 2003) “Effects of Cell Culture Process Changes on Humanized Antibody Characteristics” describes an unnamed, humanized IgG1 antibody composition with N-terminal heterogeneities due to combinations of VHS signal peptide, N-terminal glutamine, and pyroglutamic acid on the heavy chain thereof. Harris et al. “The Ideal Chromatographic Antibody Characterization Method” talk presented at the IBC Antibody Production Conference (February, 2002) reports a VHS extension on the heavy chain of E25, a humanized anti-IgE antibody. Rouse et al. Poster presented at WCBP “Glycoprotein Characterization by High Resolution Mass Spectrometry and Its Application to Biopharmaceutical Development” (Jan. 6-9, 2004) describes a monoclonal antibody composition with N-terminal heterogeneity resulting from AHS or HS signal peptide residues on the light chain thereof. In a presentation at IBC Meeting (September, 2000) “Strategic Use of Comparability Studies and Assays for Well Characterized Biologicals,” Jill Porter discussed a late-eluting form of ZENAPAX′ with three extra amino acid residues on the heavy chain thereof. US2006/0018899 describes a composition comprising a main species pertuzumab antibody and an amino-terminal leader extension variant, as well as other variant forms of the pertuzumab antibody.

[0016] Patent publications related to HER antibodies include: U.S. Pat. No. 5,677,171, U.S. Pat. No. 5,720,937, U.S. Pat. No. 5,720,954, U.S. Pat. No. 5,725,856, U.S. Pat. No. 5,770,195, U.S. Pat. No. 5,772,997, U.S. Pat. No. 6,165,464, U.S. Pat. No. 6,387,371, U.S. Pat. No. 6,399,063, US2002/0192211A1, U.S. Pat. No. 6,015,567, U.S. Pat. No. 6,333,169, U.S. Pat. No. 4,968,603, U.S. Pat. No. 5,821,337, U.S. Pat. No. 6,054,297, U.S. Pat. No. 6,407,213, U.S. Pat. No. 6,719,971, U.S. Pat. No. 6,800,738, US2004/0236078A1, U.S. Pat. No. 5,648,237, U.S. Pat. No. 6,267,958, U.S. Pat. No. 6,685,940, U.S. Pat. No. 6,821,515, WO98/17797, U.S. Pat. No. 6,127,526, U.S. Pat. No. 6,333,398, U.S. Pat. No. 6,797,814, U.S. Pat. No. 6,339,142, U.S. Pat. No. 6,417,335, U.S. Pat. No. 6,489,447, WO99/31140, US2003/0147884A1, US2003/0170234A1, US2005/0002928A1, U.S. Pat. No. 6,573,043, US2003/0152987A1, WO99/48527, US2002/0141993A1, WO01/00245, US2003/0086924, US2004/0013667A1, WO00/69460, WO01/00238, WO01/15730, U.S. Pat. No. 6,627,196B1, U.S. Pat. No. 6,632,979B1, WO01/00244, US2002/0090662A1, WO01/89566, US2002/0064785, US2003/0134344, WO 04/24866, US2004/0082047, US2003/0175845A1, WO03/087131, US2003/0228663, WO2004/008099A2, US2004/0106161, WO2004/048525, US2004/0258685A1, U.S. Pat. No. 5,985,553, U.S. Pat. No. 5,747,261, U.S. Pat. No. 4,935,341, U.S. Pat. No. 5,401,638, U.S. Pat. No. 5,604,107, WO 87/07646, WO 89/10412, WO 91/05264, EP 412,116 B1, EP 494,135 B1, U.S. Pat. No. 5,824,311, EP 444,181 B1, EP 1,006,194 A2, US 2002/0155527A1, WO 91/02062, U.S. Pat. No. 5,571,894, U.S. Pat. No. 5,939,531, EP 502,812 B1, WO 93/03741, EP 554,441 B1, EP 656,367 A1, U.S. Pat. No. 5,288,477, U.S. Pat. No. 5,514,554, U.S. Pat. No. 5,587,458, WO 93/12220, WO 93/16185, U.S. Pat. No. 5,877,305, WO 93/21319, WO 93/21232, U.S. Pat. No. 5,856,089, WO 94/22478, U.S. Pat. No. 5,910,486, U.S. Pat. No. 6,028,059, WO 96/07321, U.S. Pat. No. 5,804,396, U.S. Pat. No. 5,846,749, EP 711,565, WO 96/16673, U.S. Pat. No. 5,783,404, U.S. Pat. No. 5,977,322, U.S. Pat. No. 6,512,097, WO 97/00271, U.S. Pat. No. 6,270,765, U.S. Pat. No. 6,395,272, U.S. Pat. No. 5,837,243, WO 96/40789, U.S. Pat. No. 5,783,186, U.S. Pat. No. 6,458,356, WO 97/20858, WO 97/38731, U.S. Pat. No. 6,214,388, U.S. Pat. No. 5,925,519, WO 98/02463, U.S. Pat. No. 5,922,845, WO 98/18489, WO 98/33914, U.S. Pat. No. 5,994,071, WO 98/45479, U.S. Pat. No. 6,358,682 B1, US 2003/0059790, WO 99/55367, WO 01/20033, US 2002/0076695 A1, WO 00/78347, WO 01/09187, WO 01/21192, WO 01/32155, WO 01/53354, WO 01/56604, WO 01/76630, WO02/05791, WO 02/11677, U.S. Pat. No. 6,582,919, US2002/0192652A1, US 2003/0211530A1, WO 02/44413, US 2002/0142328, U.S. Pat. No. 6,602,670 B2, WO 02/45653, WO 02/055106, US 2003/0152572, US 2003/0165840, WO 02/087619, WO 03/006509, WO03/012072, WO 03/028638, US 2003/0068318, WO 03/041736, EP 1,357,132, US 2003/0202973, US 2004/0138160, U.S. Pat. No. 5,705,157, U.S. Pat. No. 6,123,939, EP 616,812 B1, US 2003/0103973, US 2003/0108545, U.S. Pat. No. 6,403,630 B1, WO 00/61145, WO 00/61185, U.S. Pat. No. 6,333,348 B1, WO 01/05425, WO 01/64246, US 2003/0022918, US 2002/0051785 A1, U.S. Pat. No. 6,767,541, WO 01/76586, US 2003/0144252, WO 01/87336, US 2002/0031515 A1, WO 01/87334, WO 02/05791, WO 02/09754, US 2003/0157097, US 2002/0076408, WO 02/055106, WO 02/070008, WO 02/089842 and WO 03/86467.

[0017] Patients treated with the HER2 antibody Trastuzumab/Herceptin™ are selected for therapy based on HER2 protein overexpression/gene amplification; see, for example, WO99/31140 (Paton et al.), US2003/0170234A1 (Hellmann, S.), and US2003/0147884 (Paton et al.); as well as WO01/89566, US2002/0064785, and US2003/0134344 (Mass et al.). See, also, US2003/0152987, Cohen et al., concerning immunohistochemistry (IHC) and fluorescence in situ hybridization (FISH) for detecting HER2 overexpression and amplification. WO2004/053497 and US2004/024815A1 (Bacus et al.), as well as US 2003/0190689 (Crosby and Smith), refer to determining or predicting response to Trastuzumab therapy. US2004/013297A1 (Bacus et al.) concerns determining or predicting response to ABX0303 EGFR antibody therapy. WO2004/000094 (Bacus et al.) is directed to determining response to GW572016, a small molecule, EGFR-HER2 tyrosine kinase inhibitor. WO2004/063709, Amler et al., refers to biomarkers and methods for determining sensitivity to EGFR inhibitor, erlotinib HCl. US2004/0209290, Cobleigh et al., concerns gene expression markers for breast cancer prognosis.

[0018] Patients to be treated with a HER2 dimerization inhibitor (like pertuzumab as described herein above in more detail) can be selected for therapy based on HER activation or dimerization. Patent publications concerning pertuzumab and selection of patients for therapy therewith include: WO01/00245 (Adams et al.); US2003/0086924 (Sliwkowski, M.); US2004/0013667A1 (Sliwkowski, M.); as well as WO2004/008099A2, and US2004/0106161(Bossenmaier et al.).

[0019] Herceptin™/Trastuzumab is indicated in the art for the treatment of patients with metastatic breast cancer whose tumors overexpress HER2 protein or have HER 2 gene amplification:

a) As monotherapy for the treatment of those patients who have received at least two chemotherapy regimens for their metastatic disease. Prior chemotherapy must have included at least an anthracycline and a taxane unless patients are unsuitable for these treatments. Hormone receptor positive patients must also have received hormonal therapy, unless patients are unsuitable for these treatments,
b) In combination with paclitaxel for the treatment of those patients who have not received chemotherapy for their metastatic disease and for whom an anthracycline is not suitable and
c) In combination with docetaxel for the treatment of those patients who have not received chemotherapy for their metastatic disease.

[0020] Herceptin™/Trastuzumab can also be used as adjuvant treatment in early breast cancer. Herceptin™/Trastuzumab is also approved for the treatment of patients with HER2-positive early breast cancer following surgery, chemotherapy (neoadjuvant (i.e. before surgery) or adjuvant), and radiotherapy (if applicable). In addition Herceptin in combination with capecitabine or 5-fluorouracil and cisplatin is indicated for the treatment of patients with HER2 positive locally advance or metastatic adenocarcinoma of the stomach or gastroesophageal junction who have not received prior anti-cancer treatment for their metastatic disease. The efficacy and safety of neoadjuvant pertuzumab and trastuzumab therapy has been assessed in a phase 2 trial (NEOSPHERE); Gianni (2012) Lancet Oncol 13, 25-32.

[0021] In the art, the treatment of breast cancer patients with Herceptin™/Trastuzumab is, for example, recommended and routine for patients having HER2-positive cancer. HER2-positive cancer is present if a high HER2 (protein) expression level detected by immunohistochemical methods (e.g. HER2 (+++)) or HER2 gene amplification detected by in-situ-hybridization (e.g. ISH positive, like a HER2 gene copy number higher than 4 copies of the HER2 gene per tumor cell or ratio of ≧2.0 for the number of HER2 gene copies to the number of signals for CEP17.) or both is found in samples obtained from the patients such as breast tissue biopsies or breast tissue resections or in tissue derived from metastatic sites.

[0022] WO 2011/109789, WO 2011/066342, WO 2009/089149 and WO2006/133396 disclose the therapeutic use of PD-L1 inhibitors. Moreover, WO 2010/077634 discloses anti-PD-L1 antibodies and their therapeutic use.

[0023] The present invention relates to a method of determining the need of a cancer patient for a PD-L1 inhibitor cotherapy, (i) wherein therapy comprising a modulator of the HER2/neu (ErbB2) signaling pathway and a chemotherapeutic agent is contemplated for the patient or (ii) wherein the patient is undergoing therapy comprising a modulator of the HER2/neu (ErbB2) signaling pathway and a chemotherapeutic agent, said method comprising the steps of
[0024] a) measuring in vitro in a sample from said patient the expression level of Estrogen receptor (ER) and of programmed death ligand 1 (PD-L1),
[0025] b) determining a patient as being in need of a PD-L1 inhibitor cotherapy if a low or absent ER expression level and an expression level of programmed death ligand 1 (PD-L1) that is increased in comparison to a control is measured in step (a).

[0026] Accordingly, the present invention provides a method for determining a cancer patient's need for PD-L1 modulator cotherapy in combination with a modulator of the HER2/neu (ErbB2) signaling pathway and a chemotherapeutic agent, the method comprising the steps of
[0027] testing a tumor sample of a patient for whom therapy comprising a modulator of the HER2/neu (ErbB2) signaling pathway and a chemotherapeutic agent is contemplated or who is undergoing said therapy;
[0028] determining the expression level of Estrogen receptor (ER) and of programmed death ligand 1 (PD-L1) in said tumor sample,
[0029] whereby a low or absent ER expression level and an expression level of programmed death ligand 1 (PD-L1) that is increased in comparison to the control is indicative of a successful use of PD-L1 modulator cotherapy in said patient.

[0030] As demonstrated in the appended example, it has been surprisingly found in this invention that Estrogen receptor (ER) negative (ER(−)) cancer patients (cancer patients with a low or even absent ER expression level) undergoing therapy with a modulator of the HER2/neu (ErbB2) signaling pathway (like Herceptin™/Trastuzumab) and a chemotherapeutic agent (like dodetaxel/Taxotere®) show a significantly worse pathological complete response (pCR) to the therapy compared to Estrogen receptor (ER) positive (ER(+)) cancer patients, if the expression level of programmed death ligand 1 (PD-L1) is increased in a sample of the ER negative (ER(−)) cancer patients as compared to a control. The terms “programmed death ligand 1”, “CD274” and “PD-L1” are used interchangeably herein. The ER negative (ER(−)) cancer patients with increased expression level of programmed death ligand 1 (PD-L1) as compared to a control will therefore benefit from additional cotherapy with a PD-L1 inhibitor. It is expected that the pathological complete response rate (pCR) in this patient group will increase, if these patients receive cotherapy with a PD-L1 inhibitor in addition to therapy with a modulator of the HER2/neu (ErbB2) signaling pathway (like Herceptin™/Trastuzumab) and a chemotherapeutic agent (like dodetaxel/Taxotere®). In other words, the ER negative (ER(−)) cancer patients are to receive a programmed death ligand 1 (PD-L1) inhibitor in addition to a modulator of the HER2/neu (ErbB2) signaling pathway (like Trastuzumab) and a chemotherapeutic agent (like dodetaxel/Taxotere®), if the expression level of programmed death ligand 1 (PD-L1) is increased in a sample from the patient in comparison to a control. In the following, ER negative cancer patients or (biological/tumor) samples derived from ER negative cancer patients are denoted herein as “ER(−)”. Likewise ER positive cancer patients or (biological/tumor) samples derived from ER positive cancer patients are denoted herein as “ER(+)”.

[0031] In accordance with the above, the present invention relates to a method of treating a cancer in a cancer patient for whom therapy comprising a modulator of the HER2/neu (ErbB2) signaling pathway and a chemotherapeutic agent is contemplated, the method comprising selecting a cancer patient whose cancer is determined to have a low or absent ER expression level and to have an increased expression level of programmed death ligand 1 (PD-L1) in comparison to a control, and administering to the patient an effective amount of a modulator of the HER2/neu (ErbB2) signaling pathway, of a chemotherapeutic agent and of a programmed death ligand 1 (PD-L1) inhibitor. Likewise, the present invention relates to a method of treating a cancer in a cancer patient who is undergoing therapy comprising a modulator of the HER2/neu (ErbB2) signaling pathway and a chemotherapeutic agent, the method comprising selecting a cancer patient whose cancer is determined to have a low or absent ER expression level and to have an increased expression level of programmed death ligand 1 (PD-L1) in comparison to a control, and administering to the patient an effective amount of a programmed death ligand 1 (PD-L1) inhibitor. Herein contemplated is, accordingly, a pharmaceutical composition comprising a modulator of the HER2/neu (ErbB2) signaling pathway, and an inhibitor of programmed death ligand 1 (PD-L1) for use in the treatment of cancer, whereby said cancer is determined to have a low or absent ER expression level and to have an increased expression level of programmed death ligand 1 (PD-L1) in comparison to a control.

[0032] In accordance with the above, the herein provided method for determining the need of a cancer patient for a PD-L1 inhibitor cotherapy, may comprise an additional step prior to step a), wherein said step is or comprises obtaining a sample from said cancer patient. Accordingly, the present invention provides a method of determining the need of a cancer patient for a PD-L1 inhibitor cotherapy, (i) wherein therapy comprising a modulator of the HER2/neu (ErbB2) signaling pathway and a chemotherapeutic agent is contemplated for the patient or (ii) wherein the patient is undergoing therapy comprising a modulator of the HER2/neu (ErbB2) signaling pathway and a chemotherapeutic agent, said method comprising a step of obtaining a sample from said cancer patient, the method further comprising the steps

a) measuring in vitro in a sample from said patient the expression level of Estrogen receptor (ER) and of programmed death ligand 1 (PD-L1),
b) determining a patient as being in need of a PD-L1 inhibitor cotherapy if a low or absent ER expression level and an expression level of programmed death ligand 1 (PD-L1) that is increased in comparison to a control is measured in step (a).

[0033] Furthermore, it has been found herein and is demonstrated in the appended example, that a patient's need of PD-L1 inhibitor cotherapy can be determined even more reliably, if the expression level of interferon-gamma (IFNγ) is measured in the sample of the patient in addition to the expression level of programmed death ligand 1 (PD-L1). It is shown herein that patients with low or absent ER expression have a significantly worse pathologic complete response to therapy with a modulator of the HER2/neu (ErbB2) signaling pathway and a chemotherapeutic agent, if the expression level of programmed death ligand 1 (PD-L1) is increased and if the expression level of interferon-gamma (IFNγ) is decreased.

[0034] Accordingly, the methods provided herein preferably further comprise measuring the expression level of interferon-gamma (IFNγ) in the sample from the patient, whereby a patient is determined to be in need of a PD-L1 inhibitor cotherapy, if the expression level of interferon-gamma (IFNγ) is decreased in comparison to a control. In accordance with the above, the present invention relates in a preferred aspect to a method of determining the need of a cancer patient for a PD-L1 inhibitor cotherapy, (i) wherein therapy comprising a modulator of the HER2/neu (ErbB2) signaling pathway and a chemotherapeutic agent is contemplated for the patient or (ii) wherein the patient is undergoing therapy comprising a modulator of the HER2/neu (ErbB2) signaling pathway and a chemotherapeutic agent, said method comprising the steps of
[0035] a) measuring in vitro in a sample from said patient the expression level of Estrogen receptor (ER), the expression level of programmed death ligand 1 (PD-L1), and the expression level of interferon-gamma (IFNγ)
[0036] b) determining a patient as being in need of a PD-L1 inhibitor cotherapy if a low or absent ER expression level, an expression level of programmed death ligand 1 (PD-L1) that is increased in comparison to a control, and an expression level of interferon-gamma (IFNγ) that is decreased in comparison to a control is measured in step (a).

[0037] Accordingly, an expression level of interferon-gamma (IFNγ) that is decreased in comparison to a control is indicative of a successful use of PD-L1 inhibitor cotherapy in said patient. The herein provided pharmaceutical composition is, in accordance with the above, for use in the treatment of cancer, whereby said cancer is determined to have a low or absent ER expression level, the cancer is determined to have an increased expression level of programmed death ligand 1 (PD-L1) in comparison to a control and the cancer is determined to have a decreased expression level of interferon-gamma (IFNγ) in comparison to the control. Accordingly, a pharmaceutical composition is provided herein comprising a modulator of the HER2/neu (ErbB2) signaling pathway, and an inhibitor of programmed death ligand 1 (PD-L1) for use in the treatment of cancer, whereby said cancer is determined to have a low or absent ER expression level and to have an increased expression level of programmed death ligand 1 (PD-L1) in comparison to a control and to have a decreased expression level of interferon-gamma (IFNγ) in comparison to the control.

[0038] The term “cancer patient” as used herein refers to a patient that is suspected to suffer from cancer, suffering from cancer or being prone to suffer from cancer. The cancer to be treated in accordance with the present invention can be a solid cancer, such as breast cancer or gastric cancer. Further, the cancer may be ovarian cancer or colorectal cancer. The cancer is preferably a “HER2-positive” cancer.

[0039] Preferably, the cancer is breast cancer, like early breast cancer. The breast cancer may be early stage breast cancer or metastatic breast cancer. Accordingly, the cancer patient (to be treated) is suspected to suffer from solid cancer, is suffering from solid cancer or is being prone to suffer from solid cancer, whereby the solid cancer can be breast cancer or gastric cancer. Preferably, the cancer is breast cancer, like early stage breast cancer. The patient is preferably a human.

[0040] As mentioned above, the expression level of Estrogen receptor (ER) and of programmed death ligand (PD-L1), and optionally of interferon-gamma (IFN-γ) can be measured in vitro in a sample from the patient. Preferably, the herein provided methods comprise measuring of interferon-gamma (IFN-γ) in vitro in a sample from the patient. Preferably, the sample to be assessed/analyzed herein is a tumor tissue sample. A patient (or a patient group) is determined as being in need of a PD-L1 inhibitor cotherapy if a low or absent ER expression level and an expression level of programmed death ligand 1 (PD-L1) that is increased in comparison to a control and, optionally, an expression level of interferon-gamma (IFNγ) that is decreased in comparison to the control, is measured in vitro in said sample.

[0041] The term “ER” is an abbreviation of “Estrogen receptor”. Likewise, the terms “PD-L1” and “IFN-γ” are abbreviations of the terms “programmed death ligand” and “interferon-gamma”, respectively. Accordingly, the term “ER” can be used interchangeably herein with “Estrogen receptor”. Likewise, the terms “PD-L1” and “IFN-γ” can be used interchangeably herein with the terms “programmed death ligand” and “interferon-gamma”, respectively.

[0042] Preferably, the (tumor/biological) sample of the patient and/or the cancer to be treated is characterized by or associated with a low or absent estrogen receptor (ER) expression level. Preferably, the sample of the patient is a tumor sample. The ER expression level can be ER negative (ER(−)). The term “ER(−)” can be used herein interchangeably with the term “ER negative”.

[0043] “ER negative” expression level can be determined by routine and standard procedures as described, for example, in the Guideline on Hormone Receptor Testing in Breast Cancer S. Nofech-Mozes, E. Vella, S. Dhesy-Thind, and W. Hanna (A Quality Initiative of the Program in Evidence-Based Care (PEBC), Cancer Care Ontario (CCO); Report Date: Apr. 8, 2011). The Guidelines (and references cited therein) are incorporated by reference in its entirety herein. These Guidelines are available at world wide web at cancercare.on.ca) and PEBC Pathology & Laboratory Medicine page at: https://www.cancercare.on.ca/toolbox/qualityguidelines/clin-program/pathlabebs/

[0044] Routine and standard procedures for determining the “ER negative” expression level are described in these Guideline and also in the following references:
[0045] Nofech-Mozes S, Vella E T, Dhesy-Thind S, Hagerty K L, Mangu P B, Temin S, et al. Systematic review on hormone receptor testing in breast cancer. Applied Immunohistochem Mol Morphol. 2012 May; 20(3):214-63. doi: 10.1097/PAI.0b013e318234aa12. Epub 2011 Nov. 11.
[0046] Nofech-Mozes S, Vella E T, Dhesy-Thind S, Hanna W M. Cancer Care Ontario guideline recommendations for hormone receptor testing in breast cancer. Clin Oncol (R Coll Radiol). Epub 2012 May 17.

[0047] “ER negative” expression may be determined by IHC (immunohistochemistry), if, for example the expression level of ER is low or absent and/or if the progesterone receptor (PR) expression level is low or absent. The abbreviation “PR” is used herein interchangeably with the term “progesterone receptor”. A sample or patients may be assessed as “ER negative” herein according to the following staining pattern (by IHC):

[0048] Only nuclear (not cytoplasmic) staining should be scored.

[0049] There are three categories for staining:

[0050] Positive: ≧10% staining for ER or PR

[0051] Low positive: 1% to 9% staining for ER or PR

[0052] Negative: <1% staining for ER and PR

[0053] Accordingly, a sample or patients may particularly be assessed as “ER negative” herein if the sample shows the following staining pattern by IHC: <1% staining for ER and PR.

[0054] Samples or patients may be assessed as “ER positive” herein if the sample shows a “positive” staining by IHC: ≧1% staining for ER or PR (i.e. more than 1% of the cells examined/assessed have estrogen receptors or progesterone receptors/show staining for estrogen receptors by IHC (immunohistochemistry).

[0055] Preferably, a sample or patients is assessed as “ER negative” herein if the sample shows the following staining pattern by IHC:: <1% staining for ER (i.e. less than 1% of the cells examined/assessed have estrogen receptors/show staining for estrogen receptor(s) by IHC (immunohistochemistry). Most preferably, a sample or patients is/are assessed as “ER negative” if the nuclei in a tumor tissue sample show <1% staining for ER staining by IHC. Accordingly, from the three categories provided herein above, the assessment of “ER negative” is based on <1% staining for ER by IHC.

[0056] Likewise, “ER negative” expression can be determined by further methods routinely employed in the art. For example, “ER negative” may be determined if the mRNA/RNA expression level is low or absent. Routine methods to be used comprise, but are not limited to: Allred score, IRS, Remmele score or any other suitable biochemical detection method. A person skilled in the art is aware that the cut-off for such methods has to match the cut-off as defined above via IHC.

[0057] Nucleic acid sequences and amino acid sequences of Progesterone receptor (PR), Estrogen receptor (ER), of programmed death ligand 1 (PD-L1), and/or of interferon-gamma (IFNγ) to be used herein are well known and can be retrieved from databases like NCBI. Exemplary sequences are provided herein (see for example SEQ ID NO: 38-51).

[0058] The methods and sample types used for establishing a cut-off value of a marker (like programmed death ligand 1 (PD-L1) and/or interferon-gamma (IFN-γ)) and for measuring the sample obtained from an individual or patient to be analyzed match each other or are the same. Cut-off values, i.e. values above which overexpression (e.g. increased expression of programmed death ligand 1 (PD-L1) in comparison to a control) is acknowledged can be obtained in a control group. Cut-off values, i.e. values below which decreased expression (e.g. decreased expression of interferon-gamma (IFN-γ) in comparison to a control) is acknowledged can be obtained in a control group.

[0059] The control group on which the cut-off value is based is chosen to match the group of individuals/patients under investigation, with other words, if the method of the present invention is used to determine the need for PD-L1 cotherapy in patients with breast cancer or gastric cancer, respectively, the control group is also patients with breast cancer or gastric cancer, respectively. The control group used to establish the cut-off values for both, PDL-1 and IFN-γ, respectively), comprises at least 40, or at least 50, or at least 100 individuals/patients. An expression level or corresponding value above the cut-off is considered to represent overexpression and a value at or below the cut-off is considered as decreased expression.

[0060] In one embodiment, the “IFN-γ” expression level in a tumor tissue sample from an individual/patient is compared to a cut-off value. A value above the cut-off is considered to represent overexpression of IFN-γ and a value at or below the cut-off is considered as decreased expression of IFN-γ. In one embodiment the decreased expression is acknowledged if the expression level for IFN-γ is at or below the value of the highest quintile, quartile or tertile, respectively, as established in the control group. In one embodiment the cut-off for IFN-γ is the highest tertile. In one embodiment the cut-off value is a value between the 70^{th} and the 80^{th} percentile. In one embodiment the cut-off value for IFN-γ is the 73^{rd} percentile, i.e a value above this cut-off is considered to represent overexpression of IFN-γ and a value at or below the 73^{rd} percentile is considered as decreased expression of IFN-γ. In one embodiment, individuals/patients are determined as being in need of a PD-L1 cotherapy, if IFN-γ expression in a sample (like a tumor tissue sample) is decreased (i.e. below or at the IFN-γ cut-off value) In one embodiment individuals/patients are determined as not being in need of a PDL-1 cotherapy, if IFN-γ is overexpressed (i.e. above the IFN-γ cut-off value as described above).

[0061] In one embodiment the PD-L1 expression level, in a tumor tissue sample from an individual/patient is compared to a cut-off value. A value above the cut-off is considered to represent overexpression of PD-L1 and a value at or below the cut-off is considered as decreased expression of PD-L1 In one embodiment overexpression for PDL-1 is acknowledged if the expression level for PDL-1 is above a cut-off value between the 50^{th} percentile and the 75^{th} percentile, as established in a control group. In one embodiment overexpression for PDL-1 is acknowledged if the expression level for PDL-1 is above a cut-off value between the 50^{th} percentile and the 70^{th} percentile, of the control group. In one embodiment individuals/patients are determined as being in need of a PDL-1 cotherapy, if PDL-1 is overexpressed (i.e. the PDL-1 expression level determined is above the PDL-1 cut-off value).

[0062] In one further embodiment overexpression for PDL-1 is established in the sub-group of individuals/patients having a decreased expression level of IFN-γ in a tumor tissue sample. In one embodiment overexpression for PDL-1 is acknowledged if the expression level for PDL-1 is above a cut-off value between the 40^{th} percentile and the 65^{th} percentile, as established in this sub-group. In one embodiment overexpression for PDL-1 is acknowledged if the expression level for PDL-1 is above a cut-off value between the 50^{th} percentile and the 60^{th} percentile, as established in this sub-group. In one embodiment individuals/patients are determined as being in need of a PDL-1 cotherapy, if the PDL-1 expression level in the sub-group with decreased expression of IFN-γ is above the 54^{th} percentile.

[0063] In one embodiment, individuals/patients are determined as being in need of a PDL-1 cotherapy, if IFN-γ expression in a tumor tissue sample is decreased (i.e. below or at the IFN-γ cut-off value) and PDL-1 is overexpressed (i.e. above the PDL-1 cut-off value).

[0064] The term “expression level of programmed death ligand 1 (PD-L1) that is increased in comparison to a control” can be used interchangeably herein with “expression level of programmed death ligand 1 (PD-L1) above the PDL-1 cut-off value” as defined and explained herein above.

[0065] The term “expression level of interferon-gamma (IFNγ) that is decreased in comparison to a control” can be used interchangeably herein with “expression level of interferon-gamma (IFNγ) below or at the IFNγ cut-off value”.

[0066] The present invention relates to the following aspects.

[0067] The present invention relates to a method of determining the need of a cancer patient for a PD-L1 inhibitor cotherapy, (i) wherein therapy comprising a modulator of the HER2/neu (ErbB2) signaling pathway and a chemotherapeutic agent is contemplated for the patient or (ii) wherein the patient is undergoing therapy comprising a modulator of the HER2/neu (ErbB2) signaling pathway and a chemotherapeutic agent, the method comprising the steps of
[0068] a) measuring in vitro in a sample from said patient the expression level of Estrogen receptor (ER), of programmed death ligand 1 (PD-L1), and of interferon-gamma (IFNγ);
[0069] b) determining a patient as being in need of a PD-L1 inhibitor cotherapy if a low or absent ER expression level (like ER(−)/ER-negative), an expression level of programmed death ligand 1 (PD-L1) above the PDL-1 cut-off value and an expression level of interferon-gamma (IFNγ) below or at the IFNγ cut-off value is measured in step (a).

[0070] The present invention relates to a method of treating a cancer in a cancer patient for whom therapy comprising a modulator of the HER2/neu (ErbB2) signaling pathway and a chemotherapeutic agent is contemplated, the method comprising selecting a cancer patient whose cancer is determined to have a low or absent ER expression level (like ER(−)/ER-negative) and to have an expression level of programmed death ligand 1 (PD-L1) above the PDL-1 cut-off value and to have an expression level of interferon-gamma (IFNγ) below or at the IFNγ cut-off value, and administering to the patient an effective amount of a modulator of the HER2/neu (ErbB2) signaling pathway, of a chemotherapeutic agent and of a programmed death ligand 1 (PD-L1) inhibitor.

[0071] The present invention relates to a method of treating a cancer in a cancer patient who is undergoing therapy comprising a modulator of the HER2/neu (ErbB2) signaling pathway and a chemotherapeutic agent, the method comprising selecting a cancer patient whose cancer is determined to have a low or absent ER expression level (like ER(−)/ER-negative) and to have an expression level of programmed death ligand 1 (PD-L1) above the PDL-1 cut-off value and to have an expression level of interferon-gamma (IFNγ) below or at the IFNγ cut-off value, and administering to the patient an effective amount of a programmed death ligand 1 (PD-L1) inhibitor.

[0072] The present invention relates to a pharmaceutical composition comprising a modulator of the HER2/neu (ErbB2) signaling pathway, and an inhibitor of programmed death ligand 1 (PD-L1) for use in the treatment of cancer, whereby said cancer is determined to have a low or absent ER expression level (like ER(−)/ER-negative) and to have an expression level of programmed death ligand 1 (PD-L1) above the PDL-1 cut-off value and to have an expression level of interferon-gamma (IFNγ) below or at the IFNγ cut-off value.

[0073] All explanations and definitions given herein for “PD-L1 inhibitor”, “PD-L1 inhibitor cotherapy”, “cancer”, “cancer patient”, “modulator of the HER2/neu (ErbB2) signaling pathway”, “chemotherapeutic agent”, “sample”, “expression level” and the like apply, mutatis mutandis, to the above aspects of the present invention.

[0074] The expression level of Estrogen receptor (ER), of programmed death ligand 1 (PD-L1), and of interferon-gamma (IFNγ) in a sample from the patient may be measured in vitro simultaneously or subsequently in any combination. For example, the expression level of Estrogen receptor (ER), of programmed death ligand 1 (PD-L1), and of interferon-gamma (IFNγ) may be measured simultaneously. The expression level of Estrogen receptor (ER) may be measured first, followed by the measurement of programmed death ligand 1 (PD-L1) and of interferon-gamma (IFNγ). The expression level of programmed death ligand 1 (PD-L1) may be measured first, followed by the (simultaneous or subsequent) measurement of Estrogen receptor (ER) and of interferon-gamma (IFNγ). The expression level of interferon-gamma (IFNγ). may be measured first, followed by the (simultaneous or subsequent) measurement of Estrogen receptor (ER) and of programmed death ligand 1 (PD-L1). Any order/combination of the measurement of the expression level of Estrogen receptor (ER), of programmed death ligand 1 (PD-L1), and of interferon-gamma (IFNγ) in a sample from the patient is envisaged and comprised herein.

[0075] Herein contemplated is a determination of a patient as being in need of a PD-L1 inhibitor cotherapy if, in a first step (1) a low or absent ER expression level (like ER(−)/ER-negative) is measured, and if, in a second step (2) an expression level of interferon-gamma (IFNγ) below or at the IFNγ cut-off value is measured and if, in a third step (3) an expression level of programmed death ligand 1 (PD-L1) above the PDL-1 cut-off value is measured.

[0076] The present invention relates to the following aspects:

[0077] The present invention relates to a method of determining the need of a cancer patient for a PD-L1 inhibitor cotherapy, (i) wherein therapy comprising a modulator of the HER2/neu (ErbB2) signaling pathway and a chemotherapeutic agent is contemplated for the patient or (ii) wherein the patient is undergoing therapy comprising a modulator of the HER2/neu (ErbB2) signaling pathway and a chemotherapeutic agent, the method comprising the steps of
[0078] a) measuring in vitro in a sample from said patient the expression level of Estrogen receptor (ER), of programmed death ligand 1 (PD-L1), and of interferon-gamma (IFNγ);
[0079] b) determining a patient as being in need of a PD-L1 inhibitor cotherapy if, in a first step (1) a low or absent ER expression level (like ER(−)/ER-negative) is measured, and if in a second step (2) an expression level of interferon-gamma (IFNγ) below or at the IFNγ cut-off value is measured and if in a third step (3) an expression level of programmed death ligand 1 (PD-L1) above the PDL-1 cut-off value is measured.

[0080] The present invention relates to a method of treating a cancer in a cancer patient for whom therapy comprising a modulator of the HER2/neu (ErbB2) signaling pathway and a chemotherapeutic agent is contemplated, the method comprising selecting a cancer patient whose cancer is determined to have in a first step (1) a low or absent ER expression level (like ER(−)/ER-negative) and in a second step (2) to have an expression level of interferon-gamma (IFNγ) below or at the IFNγ cut-off value, and in a third step (3) to have an expression level of programmed death ligand 1 (PD-L1) above the PDL-1 cut-off value, and administering to the patient an effective amount of a modulator of the HER2/neu (ErbB2) signaling pathway, of a chemotherapeutic agent and of a programmed death ligand 1 (PD-L1) inhibitor.

[0081] The present invention relates to a method of treating a cancer in a cancer patient who is undergoing therapy comprising a modulator of the HER2/neu (ErbB2) signaling pathway and a chemotherapeutic agent, the method comprising selecting a cancer patient whose cancer is determined to have in have in a first step (1) a low or absent ER expression level (like ER(−)/ER-negative) and in a second step (2) to have an expression level of interferon-gamma (IFNγ) below or at the IFNγ cut-off value, and in a third step (3) to have an expression level of programmed death ligand 1 (PD-L1) above the PDL-1 cut-off value, and administering to the patient an effective amount of a programmed death ligand 1 (PD-L1) inhibitor.

[0082] The present invention relates to a pharmaceutical composition comprising a modulator of the HER2/neu (ErbB2) signaling pathway, and an inhibitor of programmed death ligand 1 (PD-L1) for use in the treatment of cancer, whereby said cancer is determined to have a low or absent ER expression level (like ER(−)/ER-negative), to have an expression level of interferon-gamma (IFNγ) below or at the IFNγ cut-off value, to have an expression level of programmed death ligand 1 (PD-L1) above the PDL-1 cut-off value.

[0083] All explanations and definitions given herein for “PD-L1 inhibitor”, “PD-L1 inhibitor cotherapy”, “cancer”, “cancer patient”, “modulator of the HER2/neu (ErbB2) signaling pathway”, “chemotherapeutic agent”, “sample”, “expression level” and the like apply, mutatis mutandis, to the above aspects of the present invention.

[0084] The following relates to a an exemplary cut-off value allowing determining a patient as being in need of a PD-L1 inhibitor cotherapy in accordance with the present invention. It can be easily determined by routine techniques (such as Affymetrix) whether the expression level of PD-L1 and/or IFN-gamma in a sample from a patient is below or above such cut-off values.

[0085] If a gene expression analysis gives a result for IFN-gamma expression higher or equal to 4.8 no combination treatment (HER2-targeted and PDL1-targeted) is recommended and no further PDL1 assessment is necessary. If a gene expression analysis gives a result for IFN-gamma lower than 4.8 a parallel assessment of PDL-1 is necessary. If PDL-1 gene expression analysis then gives a result of higher or equal to 5.3 a combination treatment (HER2-targeted and PDL1-targeted) is recommended. This exemplary protocol is illustrated in FIG. 19.

[0086] In this context Affymetrix can be performed as follows: Total RNA from tumor cells was extracted FFPE tumor sections using Light Cycler Pertuzumab FFPET RNA Kit (Roche Diagnostics). RNA was processed for hybridization using the WT-Ovation FFPE System V2 (Nugen) and hybridized to Affymetrix GeneChip® Human Genome U133 Plus 2.0 Arrays. Hybridized arrays were washed and stained on Affymetrix Fluidics Station 450 and scanned with an Affymetrix GeneChip® Scanner 3000 7G.

[0087] As mentioned the expression level of PD-L1 and/or IFN-gamma in a sample from a patient can be determined by routine techniques, such as Affymetrix. The following relates an exemplary protocol for such a determination (also termed herein Gene Expression Profiling):

[0088] The tumor biopsy samples can be profiled for gene expression on AFFYMETRIX HG-U133Plus 2 whole Human Genome microarray platform. Roche HighPure RNA extraction, NuGen amplification and standard AFFYMETRIX hybridization and scanning protocols can be used. These protocols etc. are incorporated herein by reference. All array scans usually pass standard AFFYMETRIX QC. Robust Multiarray algorithm (RMA) can be used for preprocessing of raw signals (Irizarry et al, 2003. World wide web at .ncbi.nlm.nih.gov/pubmed/12925520; incorporated herein by reference). All probe sets available for the genes of interest can be retrieved as reported below. Fir gene CD274, when several probe sets were available to represent this gene, the probe set with the highest average expression value (defined as an arithmetical average of expression of a given probe set) was selected to represent the gene:

### CD274 (PDL1)

[0089] 223834_at selected for PDL1

[0090] 227458_at

[0091] The selected probe set corresponds to the last exon/3′UTR of the gene and captures all known RefSEq mRNAs (see FIG. 6A and FIG. 6B)

### IFNG

[0092] 210354_at

[0093] This probe set also represents the last exon/3′UTR of the gene and captures all known RefSEq mRNAs (see FIG. 7A and FIG. 7B)

[0094] In accordance with the above, the expression level of Interferon-gamma may be measured prior to the expression level of Estrogen receptor (ER) and/or prior to the expression level of programmed death ligand 1 (PD-L1). The step of measuring the expression level of Estrogen receptor (ER) and of programmed death ligand 1 (PD-L1) may even be absent.

[0095] As shown in the appended Example, PD-L1 cotherapy can, for example, not be recommended if the expression level of interferon-gamma (IFNγ) is higher or equal to (about) 4.8 as determined by routine methods like Affymetrix.

[0096] Accordingly, the present invention provides a method of determining the need of a cancer patient for a PD-L1 inhibitor cotherapy, wherein therapy comprising a modulator of the HER2/neu (ErbB2) signaling pathway and a chemotherapeutic agent is contemplated for the patient or wherein the patient is undergoing therapy comprising a modulator of the HER2/neu (ErbB2) signaling pathway and a chemotherapeutic agent, the method comprising the steps

(a) measuring in vitro in a sample from said patient the expression level of interferon-gamma (IFNγ)
(b) determining a patient as being not in need of a PD-L1 inhibitor cotherapy if the expression level of interferon-gamma (IFNγ) is higher or equal to (about) 4.8 as determined by routine methods like Affymetrix in step (a).

[0097] If the expression level of interferon-gamma (IFNγ) is lower than (about) 4.8 as determined by routine methods like Affymetrix, the expression level of programmed death ligand 1 (PD-L1) and, optionally, Estrogen receptor (ER) can be measured in vitro in a sample from said patient.

[0098] Accordingly, the present invention provides a method of determining the need of a cancer patient for a PD-L1 inhibitor cotherapy, wherein therapy comprising a modulator of the HER2/neu (ErbB2) signaling pathway and a chemotherapeutic agent is contemplated for the patient or wherein the patient is undergoing therapy comprising a modulator of the HER2/neu (ErbB2) signaling pathway and a chemotherapeutic agent, the method comprising the steps

(a) measuring in vitro in a sample from said patient the expression level of interferon-gamma (IFNγ), Estrogen receptor (ER) and of programmed death ligand 1 (PD-L1),
(b) determining a patient as being in need of a PD-L1 inhibitor cotherapy if the expression level of interferon-gamma (IFNγ) is lower than (about) 4.8 as determined by routine methods like Affymetrix, and if a low or absent ER expression level and, optionally, an expression level of programmed death ligand 1 (PD-L1) that is increased in comparison to a control is measured in step (a).

[0099] A patient can be determined in accordance with the present invention to be in need of PD-L1 inhibitor cotherapy if the expression level of programmed death ligand 1 (PD-L1) measured in the sample from the patient is increased in comparison to a control. For example, the expression level of programmed death ligand 1 (PD-L1) can be higher or equal to (about) 5.3 determined by routine methods like Affymetrix.

[0100] All explanations and definitions given herein for “PD-L1 inhibitor”, “PD-L1 inhibitor cotherapy”, “cancer”, “cancer patient”, “modulator of the HER2/neu (ErbB2) signaling pathway”, “chemotherapeutic agent”, “sample”, “expression level” and the like as given herein apply, mutatis mutandis, in this context.

[0101] Accordingly, the present invention relates to a method of treating a cancer in a cancer patient for whom therapy comprising a modulator of the HER2/neu (ErbB2) signaling pathway and a chemotherapeutic agent is contemplated, the method comprising selecting a cancer patient whose cancer is determined to have a low or absent ER expression level and to have an increased expression level of programmed death ligand 1 (PD-L1) in comparison to a control, and an expression level of interferon-gamma (IFNγ) that is lower than (about) 4.8 as determined by routine methods like Affymetrix, and administering to the patient an effective amount of a modulator of the HER2/neu (ErbB2) signaling pathway, of a chemotherapeutic agent and of a programmed death ligand 1 (PD-L1) inhibitor.

[0102] Furthermore, the present invention relates to a method of treating a cancer in a cancer patient who is undergoing therapy comprising a modulator of the HER2/neu (ErbB2) signaling pathway and a chemotherapeutic agent, the method comprising selecting a cancer patient whose cancer is determined to have a low or absent ER expression level and to have an increased expression level of programmed death ligand 1 (PD-L1) in comparison to a control, and to have an expression level of interferon-gamma (IFNγ) that is lower than (about) 4.8 as determined by routine methods like Affymetrix, and administering to the patient an effective amount of a programmed death ligand 1 (PD-L1) inhibitor.

[0103] A pharmaceutical composition is provided comprising a modulator of the HER2/neu (ErbB2) signaling pathway, and an inhibitor of programmed death ligand 1 (PD-L1) for use in the treatment of cancer, whereby said cancer is determined to have a low or absent ER expression level and to have an increased expression level of programmed death ligand 1 (PD-L1) in comparison to a control, and an expression level of interferon-gamma (IFNγ) that is lower than (about) 4.8 as determined by routine methods like Affymetrix.

[0104] The pharmaceutical composition for use in the treatment of cancer may further comprise a chemotherapeutic agent.

[0105] In accordance with the above, the herein provided methods may comprise a step of measuring the expression level of Interferon-gamma (IFNγ) in said sample and determining a patient as being in need of a PD-L1 inhibitor cotherapy if an expression level of interferon-gamma (IFNγ) that is decreased in comparison to the control is measured. For example, a “decreased expression level” of interferon-gamma (IFNγ) may be an expression level lower than (about) 4.8 as determined by routine methods like Affymetrix. Accordingly, the cancer that is determined to have a decreased expression level of interferon-gamma (IFNγ) in comparison to the control may be determined to have an expression level of interferon-gamma (IFNγ) that is lower than (about) 4.8 as determined by routine methods like Affymetrix,

[0106] It is envisaged herein that the expression level may be reflected in the activity of the gene product/protein. Accordingly, also the activity of ER, PD-L1 and/or IFN-γ can be measured and evaluated in addition or in the alternative to the expression level in accordance with the present invention. A person skilled in the art is aware of corresponding means and methods for detecting and evaluating the ER, PD-L1 and IFN-γ expression level and/or activity. Exemplary methods to be used include but are not limited to molecular assessments such as Western Blots, Northern Blots, Real-Time PCR and the like. Such methods are described herein in detail.

[0107] The expression level of ER, PD-L1 and/or IFN-γ may be the mRNA expression level of ER, PD-L1 and/or IFN-γ. If the gene product is an RNA, in particular an mRNA (e.g. unspliced, partially spliced or spliced mRNA), determination can be performed by taking advantage of northern blotting techniques, in situ hybridization, hybridization on microarrays or DNA chips equipped with one or more probes or probe sets specific for mRNA transcripts or PCR techniques, like, quantitative PCR techniques, such as Real time PCR. These and other suitable methods for binding (specific) mRNA are well known in the art and are, for example, described in Sambrook and Russell (2001, loc. cit.). A skilled person is capable of determining the amount of the component, in particular said gene products, by taking advantage of a correlation, preferably a linear correlation, between the intensity of a detection signal and the amount of the gene product to be determined.

[0108] The expression level may be the protein expression level of ER, PD-L1 and/or IFN-γ. Quantification of the protein expression level can be performed by taking advantage of the well known techniques such as western blotting techniques, immunoassays, gel- or blot-based methods, IHC, mass spectrometry, flow cytometry, FACS and the like. Generally, a person skilled in the art is aware of methods for the quantitation of (a) polypeptide(s)/protein(s). Amounts of purified polypeptide in solution can be determined by physical methods, e.g. photometry. Methods of quantifying a particular polypeptide in a mixture may rely on specific binding, e.g of antibodies. Specific detection and quantitation methods exploiting the specificity of antibodies comprise for example immunohistochemistry (in situ). Western blotting combines separation of a mixture of proteins by electrophoresis and specific detection with antibodies. Electrophoresis may be multi-dimensional such as 2D electrophoresis. Usually, polypeptides are separated in 2D electrophoresis by their apparent molecular weight along one dimension and by their isoelectric point along the other direction. Alternatively, protein quantitation methods may involve but are not limited to mass spectrometry or enzyme-linked immunosorbant assay methods.

[0109] Also the use of high throughput screening (HTS) is envisaged in the context of the present invention. Suitable (HTS) approaches are known in the art. A person skilled in the art is readily in the position to adapt such protocols or known HTS approaches to the performance of the methods of the present invention. Such assays are usually performed in liquid phase, wherein for each cell/tissue/cell culture to be tested at least one reaction batch is made. Typical containers to be used are micro titer plates having for example, 384, 1536, or 3456 wells (i.e. multiples of the “original” 96 reaction vessels). Robotics, data processing and control software, and sensitive detectors, are further commonly used components of a HTS device. Often robot system are used to transport micro titer plates from station to station for addition and mixing of sample(s) and reagent(s), incubating the reagents and final readout (detection). Usually, HTS can be used in the simultaneous preparation, incubation and analysis of many plates. The assay can be performed in a single reaction (which is usually preferred), may, however, also comprise washing and/or transfer steps. Detection can be performed taking advantage of radioactivity, luminescence or fluorescence, like fluorescence-resonance-energy transfer (FRET) and fluorescence polarisation (FP) and the like. The biological samples described herein can also be used in such a context. In particular cellular assays and in vivo assays can be employed in HTS. Cellular assays may also comprise cellular extracts, i.e. extracts from cells, tissues and the like. However, preferred herein is the use of cell(s) or tissue(s) as biological sample (in particular a sample obtained from a patient/subject suffering or being prone to suffer from cancer), whereas in vivo assays are particularly useful in the validation of modulators/inhibitors/chemotherapeutic agents to be used herein. Depending on the results of a first assay, follow up assays can be performed by re-running the experiment to collect further data on a narrowed set (e.g. samples found “positive” in the first assay), confirming and refining observations.

[0110] As used in context of the methods of the present invention, a non-limiting example of a “control” is preferably a control from a patient who is not in need of a PD-L1 inhibitor cotherapy, for example a sample/cell/tissue obtained from one or more healthy subjects or one or more patients that suffer from a cancer/tumor and are known to be not in need of a PD-L1 inhibitor cotherapy treatment. For example, such a control (sample) may be from a patient who does not benefit from additional PD-L1 inhibitor cotherapy. Another non-limiting example of a “control” is an “internal standard”, for example a mixture of purified or synthetically produced proteins and/or peptides or RNA, where the amounts of each protein/peptide/RNA is gauged by using the control described above.

[0111] A further non-limiting example of a “control” may be a “healthy” control, for example a sample/cell/tissue obtained from a healthy subject or patient that is not suffering from a cancer/tumor or a cell obtained from such a subject. In accordance with the above, the reference or control expression level of ER, PD-L1 and/or IFN-γ is that determined in (a sample of) the corresponding healthy control subject/patient, i.e. it is the “normal” status of ER, PD-L1 and/or IFN-γ. The control may also be a sample/cell/tissue obtained from the individual or patient suspected of suffering from the cancer provided that the sample/cell/tissue does not contain tumor or cancer cells. In a further alternative, the “control” may be a sample/cell/tissue obtained from an individual or patient suffering from the cancer, that has been obtained prior to the development or diagnosis of said cancer.

[0112] The sample to be assessed in accordance with the herein provided methods may comprise non-diseased cells and/or diseased cells, i.e. non-cancerous cells and/or cancerous cells. However the content of cancerous cells among non cancerous cells should be higher than for example 50%. The sample may also (or even solely) comprise cancer/tumor cell(s), such as breast cancer/tumor cell(s). The term “sample” shall generally mean any biological sample obtained from a patient's tumor. The sample may be a tissue resection or a tissue biopsy. The sample may also be a metastatic lesion or a section of a metastatic lesion or a blood sample known or suspected to comprise circulating tumor cells. In accordance with the above, the biological sample may comprise cancer cells and to a certain extent i.e. less than for example 50% non-cancer cells (other cells). The skilled pathologist is able to differentiate cancer cells from normal tissue cells. Methods for obtaining tissue biopsies, tissue resections and body fluids and the like from mammals, such as humans, are well known in the art.

[0113] As explained above, the cancer patient who is determined to be in need of PD-L1 inhibitor cotherapy in accordance with the present invention is undergoing therapy comprising a modulator of the HER2/neu (ErbB2) signaling pathway and a chemotherapeutic agent or such a therapy comprising a modulator of the HER2/neu (ErbB2) signaling pathway and a chemotherapeutic agent is contemplated for the patient. Therapy comprising a modulator of the HER2/neu (ErbB2) signaling pathway and a chemotherapeutic agent is indicated for patients with “HER2-positive cancer”, like a patient that is suspected to suffer from a HER2-positive cancer, suffering from a HER2-positive cancer or being prone to suffer from a HER2-positive cancer. Preferably, the cancer to be treated is in accordance with the present invention a “HER2-positive cancer”, particularly a “HER2-positive breast cancer”. A “HER2-positive cancer” can be a “HER2-positive breast cancer” or a “HER2-positive gastric cancer”. Further, the HER2-positive cancer may be ovarian cancer, lung cancer, colorectal cancer, kidney cancer, bone cancer, bone marrow cancer, bladder cancer, skin cancer, prostate cancer, esophagus cancer, salivary gland cancer, pancreas cancer, liver cancer, head and neck cancer, CNS (especially brain) cancer, cervix cancer, cartilage cancer, colon cancer, genitourinary cancer, gastrointestinal tract cancer, pancreas cancer, synovium cancer, testis cancer, thymus cancer, thyroid cancer and uterine cancer.

[0114] The term “HER2-positive cancer” as used herein refers to a cancer/tumorous tissue etc. which comprises cancer cells which have higher than normal levels of HER2. For the purpose of the present invention, “HER2-positive cancer” has an immunohistochemistry (IHC) score of at least 2+ and/or an in situ hybridization (ISH) amplification ratio ≧2.0 (i.e. is ISH-positive). Accordingly, HER2-positive cancer is present if a high HER2 (protein) expression level detected e.g. by immunohistochemical methods and/or HER2 gene amplification detected by in-situ-hybridization (ISH positive, like a HER2 gene copy number higher than 4 copies of the HER2 gene per tumor cell or ratio of ≧2.0 for the number of HER2 gene copies to the number of signals for CEP17.) is found in samples obtained from the patients such as breast tissue biopsies or breast tissue resections or in tissue derived from metastatic sites. In one embodiment “HER2-positive cancer” has an immunohistochemistry (IHC) score of HER2(3+) and/or is ISH positive.

[0115] The expression level of HER2 may be detected by an immunohistochemical method, whereas said HER2 gene amplification status can be measured with in situ hybridization methods, like fluorescence in situ hybridization techniques (FISH). Corresponding assays and kits are well known in the art, for protein expression assays as well as for the detection of gene amplifications. Alternatively other methods like qRT-PCR might be used to detect levels of HER2 gene expression. The expression level of HER2 can, inter alia, be detected by an immunohistochemical method. Such methods are well known in the art and corresponding commercial kits are available. Exemplary kits which may be used in accordance with the present invention are, inter alia, HerceptTest™ produced and distributed by the company Dako or the test called Ventana Pathway™. The level of HER2 protein expression may be assessed by using the reagents provided with and following the protocol of the HercepTest™. A skilled person will be aware of further means and methods for determining the expression level of HER2 by immunohistochemical methods; see for example WO 2005/117553. Therefore, the expression level of HER2 can be easily and reproducibly determined by a person skilled in the art without undue burden. However, to ensure accurate and reproducible results, the testing must be performed in a specialized laboratory, which can ensure validation of the testing procedures.

[0116] The expression level of HER2 can be classified in a low expression level, an intermediate expression level and a high expression level. It is preferred in context of this invention that HER2-positive disease is defined by a strong expression level of HER2 (e.g. HER2(3+) by IHC), for example determined in a sample of a cancer patient.

[0117] The recommended scoring system to evaluate the IHC staining patterns which reflect the expression levels of HER2 designated herein HER2(0), HER2(+), HER2(++) and HER2(+++), is as follows:

| Staining | | HER2 |
|---|---|---|
| Intensity | | overexpression |
| Score | Staining Pattern | assessment |
| 0 | No staining is observed or membrane | negative |
| | staining is observed in <10% of the | |
| | tumor cells | |
| 1+ | A faint/barely perceptible membrane | negative |
| | staining is detected in >10% of the | |
| | tumor cells. The cells are only stained | |
| | in part of their membrane. | |
| 2+ | A weak to moderate complete staining is | weak to moderate |
| | detected in >10% of the tumor cells. | overexpression. |
| 3+ | A strong complete membrane staining is | strong |
| | detected in >10% of the tumor cells. | overexpression. |

[0118] The above IHC staining patterns are routinely used in determining HER2-positive breast cancer. The terms HER2(+), HER2(++) and HER2(+++) used herein are equivalent to the terms HER2(1+), HER2(2+) and HER2(3+). A “low protein expression level” used in context of this invention corresponds to a 0 or 1+ score (“negative assessment” according to the table shown herein above), an “weak to moderate protein expression level” corresponds to a 2+ score (“weak to moderate overexpression”, see the table above) and a “high protein expression level” corresponds to a 3+ score (“strong overexpression”, see the table above). As described herein above in detail, the evaluation of the protein expression level (i.e. the scoring system as shown in the table) is based on results obtained by immunohistochemical methods. As a standard or routinely, the HER-2 status is, accordingly, performed by immunohistochemistry with one of two FDA-approved commercial kits available; namely the Dako Herceptest™ and the Ventana Pathway™. These are semi-quantitative assays which stratify expression levels into 0 (<20,000 receptors per cell, no expression visible by IHC staining), 1+ (˜100,000 receptors per cell, partial membrane staining, <10% of cells overexpressing HER-2), 2+ (˜500,000 receptors per cell, light to moderate complete membrane staining, >10% of cells overexpressing HER-2), and 3+ (˜2,000,000 receptors per cell, strong complete membrane staining, >10% of cells overexpressing HER-2).

[0119] Alternatively, further methods for the evaluation of the protein expression level of HER2 may be used, e.g. Western Blots, ELISA-based detection systems and so on.

[0120] A HER2-positive cancer may also be diagnosed by assessing the gene amplification status of HER2. HER2-positive cancer is, accordingly, diagnosed if this assessment by ISH is positive. In accordance with this assessment, a HER2-positive cancer may, inter alia, relate to an average HER2 gene copy number higher than 4 copies of the HER2 gene per tumor cell (for those test systems without an internal centromere control probe) or to a HER2/CEP17 ratio of >=2.0 (for those test systems using an internal chromosome 17 centromere control probe). In other words, the HER2-positive cancer may, inter alia, relate to a HER2 gene copy number greater than 4. The amplification level of the HER2 gene may easily be identified by in situ hybridization (ISH) like fluorescent in situ hybridization (FISH), chromogenic in situ hybridization (CISH) and silver in situ hybridization (SISH). These methods are known to the skilled artisan. The principles of these methods can be deduced from standard text books. Commercial kits for the determination of the HER2 gene amplification status by in situ hybridization are available.

[0121] The below IHC staining patterns are recommended for determining HER2-positive gastric cancer (see Dako Herceptest package insert).

of Hercep Test™ stained biopsies a cluster of at least 5 stained tumor cells is recommended. A cluster of at least 5 stained tumor cells consists of 5 connected HER2 stained tumor cells.

TABLE 9
Interpretation and scoring of HER2 immunohistochemical staining

| | | | HER2 |
|---|---|---|---|
| | | | Over- |
| | Surgical Specimen- | Biopsy Specimen- | expression |
| Score | Staining Pattern | Staining Pattern | Assessment |
| 0 | No reactivity or | No reactivity or no | Negative |
| | membranous reactivity | membranous reactivity | |
| | in <10% of tumor cells | in any (or <5 clustered) | |
| | | tumor cell | |
| 1+ | Faint/barely perceptible | Tumor cell cluster | Negative |
| | membranous reactivity | (≧5 cells) with a | |
| | in ≧10% of tumor cells, | faint/barely perceptible | |
| | cells are reactive only in | membranous reactivity | |
| | part of their membrane | irrespective of percentage | |
| | | of tumor cells stained | |
| 2+ | Weak to moderate | Tumor cell cluster | Equivocal |
| | complete, basolateral | (≧5 cells) with a | |
| | or lateral membranous | weak to moderate | |
| | reactivity in ≧10% | complete, basolateral | |
| | of tumor cells | or lateral membranous | |
| | | reactivity irrespective | |
| | | of percentage of | |
| | | tumor cells stained | |
| 3+ | Strong complete, | Tumor cell cluster | Positive |
| | basolateral or | (≧5 cells) with a | |
| | lateral membranous | strong complete, | |
| | reactivity in ≧10% | basolateral or lateral | |
| | of tumor cells | membranous | |
| | | reactivity irrespective | |
| | | of percentage | |
| | | of tumor cells stained | |

Guidelines based on Hofmann et al.(40).

[0122] A more refined IHC staining patterns for determining HER2-positive gastric cancer is as follows:

| | | | HER2 |
|---|---|---|---|
| Staining | | | Over- |
| Intensity | Surgical specimen- | Biopsy specimen- | expression |
| Score | staining pattern | staining pattern | Assessment |
| 0 | No reactivity or | No reactivity or no | Negative |
| | no membranous | membranous reactivity | |
| | reactivity in | in any tumour cell | |
| | <10% of tumour | | |
| | cells | | |
| 1+ | Faint/barely | Tumour cell cluster (≧5 | Negative |
| | perceptible | cells) with a faint/barely | |
| | membranous | perceptible membranous | |
| | reactivity in ≧10% | reactivity irrespective of | |
| | of tumour cells; | percentage of tumour | |
| | cells are reactive | cells stained | |
| | only in part of | | |
| | their membrane | | |
| 2+ | Weak to moderate | Tumour cell cluster (≧5 | Equivocal |
| | complete, | cells) with a weak to | |
| | basolateral or | moderate complete, | |
| | lateral membranous | basolateral or lateral | |
| | reactivity in ≧10% | membranous reactivity | |
| | of tumour cells | irrespective of percentage | |
| | | of tumour cells stained | |
| 3+ | Strong complete, | Tumour cell cluster (≧5 | Positive |
| | basolateral or | cells) with a strong | |
| | lateral membranous | complete, basolateral | |
| | reactivity | or lateral membranous | |
| | in ≧10% of | reactivity irrespective | |
| | tumour cells | of percentage of | |
| | | tumour cells stained | |

[0123] As indicated above, the HER2 positive cancer to be treated in accordance with the present invention may be breast cancer, such early stage breast cancer. The term “early-stage breast cancer” as used herein refers to breast cancer that has not spread beyond the breast or the auxiliary lymph nodes. Such cancer can be generally treated with neoadjuvant or adjuvant therapy. The term “neoadjuvant therapy” as used herein refers to systemic therapy given prior to surgery. The term “adjuvant therapy” refers to systemic therapy given after surgery. In accordance with the above, treatment may be neoadjuvant or adjuvant therapy of early-stage breast cancer.

[0124] In accordance with the above, the sample to be assessed can be (obtained) from a patient with HER2-positive cancer as defined above. For example, the sample may be obtained from a tumorous tissue, (a) tumor(s) and, accordingly, is (a) tumor cell(s) or (a) tumor tissue(s) suspected of being HER2-positive tumour, like a breast tumor and the like. A person skilled in the art is in the position to identify such tumors and/or individuals/patients suffering from corresponding cancer using standard techniques known in the art and methods disclosed herein. Generally, said tumor cell or cancer cell may be obtained from any biological source/organism, particularly any biological source/organism, suffering from the above-mentioned cancer. In context of this invention particular useful cells are, preferably, human cells. These cells can be obtained from e.g. biopsies or from biological samples. The tumor/cancer/tumor cell/cancer cell is a solid tumor/cancer/tumor cell/cancer cell. In accordance with the above, the cancer/tumor cell may be a breast cancer/tumor cell or said sample comprises a cancer/tumor cell, such as a breast cancer/tumor cell. In line with the above, said tumor/cancer may be a breast tumor/cancer.

[0125] The modulator of the HER2/neu (ErbB2) signaling pathway may be an inhibitor of HER2, for example, a HER dimerization/signaling inhibitor. The HER dimerization inhibitor may be a HER2 dimerization inhibitor. The HER dimerization inhibitor may inhibit HER heterodimerization or HER homodimerization. The HER dimerization inhibitor may be an anti-HER antibody. The term “antibody” herein is used in the broadest sense and specifically covers intact monoclonal antibodies, polyclonal antibodies, multispecific antibodies (e.g., bispecific antibodies) formed from at least two intact antibodies, and antibody fragments, so long as they exhibit the desired biological activity. Also human and humanized as well as CDR-grafted antibodies are comprised.

[0126] The HER antibody may bind to a HER receptor selected from the group consisting of EGFR, HER2 and HER3. Preferably, the antibody binds to HER2. The anti HER2 antibody may bind to domain II of HER2 extracellular domain. The antibody may bind to a junction between domains I, II and III of HER2 extracellular domain. The anti HER2 antibody may be Pertuzumab.

[0127] For the purposes herein, “Pertuzumab” and “rhuMAb 2C4”, which are used interchangeably, refer to an antibody comprising the variable light and variable heavy domains (amino acid sequences thereof shown in SEQ ID Nos. 5 and 6, respectively, as depicted in FIG. 2). The variable light and variable heavy domains of variant 574/Pertuzumab are also shown in FIG. 2 (amino acid sequences thereof shown in SEQ ID Nos. 7 and 8, respectively, as depicted in FIG. 2). Where Pertuzumab is an intact antibody, it preferably comprises an IgG1 antibody; in one embodiment comprising the light chain amino acid sequence in it preferably comprises the light chain and heavy chain amino acid sequences, respectively, as shown in FIGS. 3A/3B and 5A/5B (FIG. 5A/5B show the light chain and heavy chain amino acid sequences of a variant Pertuzumab). The heavy chain amino acid sequences of Pertuzumab as shown in FIG. 3B may optionally comprise an additional amino acid “K” at position 449 at the C-terminus. The antibody is optionally produced by recombinant Chinese Hamster Ovary (CHO) cells. The terms “Pertuzumab” and “rhuMAb 2C4” herein cover biosimilar versions of the drug with the United States Adopted Name (USAN) or International Nonproprietary Name (INN): Pertuzumab. Again, corresponding sequences are shown in FIGS. 2 to 5.

[0128] The modulator of the HER2/neu (ErbB2) signaling pathway may be an inhibitor of HER shedding, for example a HER2 shedding inhibitor. The inhibitor of HER shedding may inhibit HER heterodimerization or HER homodimerization. Said inhibitor of HER shedding may be an anti-HER antibody.

[0129] The term “antibody” herein is used in the broadest sense and specifically covers intact monoclonal antibodies, polyclonal antibodies, multispecific antibodies (e.g., bispecific antibodies) formed from at least two intact antibodies, and antibody fragments, so long as they exhibit the desired biological activity. Also human and humanized as well as CDR-grafted antibodies are comprised.

[0130] The anti-HER antibody may bind to a HER receptor selected from the group consisting of EGFR, HER2 and HER3. Preferably, the antibody binds to HER2. The HER2 antibody may bind to sub-domain IV of the HER2 extracellular domain. Preferably, the HER2 antibody is Herceptin™/Trastuzumab.

[0131] For the purposes herein, “Herceptin™”/“Trastuzumab” and “rhuMAb4D5-8”, which are used interchangeably, refer to an antibody comprising the variable light domains and variable heavy domains (amino acid sequences thereof are shown in FIG. 4, respectively; the domain is indicated by arrows). Where Trastuzumab is an intact antibody, it preferably comprises an IgG1 antibody; in one embodiment comprising the light chain amino and the heavy chain amino acid sequence as shown in FIG. 4. The antibody is optionally produced by Chinese Hamster Ovary (CHO) cells. The terms “Trastuzumab” and “rhuMAb4D5-8” herein cover biosimilar versions of the drug with the United States Adopted Name (USAN) or International Nonproprietary Name (INN): Trastuzumab.

[0132] The inhibitor of programmed death ligand 1 (PD-L1) may be an antibody specifically binding to PD-L1 (anti-PD-L1 antibody). Again, the term “antibody” is used in the broadest sense and specifically covers intact monoclonal antibodies, polyclonal antibodies, multi specific antibodies (e.g., bispecific antibodies) formed from at least two intact antibodies, and antibody fragments, so long as they exhibit the desired biological activity. Also human and humanized as well as CDR-grafted antibodies are comprised.

[0133] Exemplary anti-PD-L1 antibodies are disclosed in WO 2010/077634 which is incorporated herein in its entirety. Corresponding exemplary anti-PD-L1 antibodies to be used in accordance with the present invention are described below.

[0134] The anti-PD-L1 antibody may comprise a heavy chain variable region polypeptide comprising an HVR-H1, HVR-H2 and HVR-H3 sequence, wherein:

(SEQ ID NO: 1)

(a) the HVR-H1 sequence is GFTFSX1SWIH;

(SEQ ID NO: 2)

(b) the HVR-H2 sequence is AWIX2PYGGSX3YYADSVKG;

(SEQ ID NO: 3)

(c) the HVR-H3 sequence is RHWPGGFDY;

further wherein: X1 is D or G; X2 is S or L; X3 is T or S. X1 may be D; X2 may be S and X3 may be T.

[0135] The polypeptide may further comprise variable region heavy chain framework sequences juxtaposed between the HVRs according to the formula: (HC-FR1)-(HVR-H1)-(HC-FR2)-(HVR-H2)-(HC-FR3)-(HVR-H3)-(HC-FR4). The framework sequences may be derived from human consensus framework sequences. The framework sequences may be VH subgroup III consensus framework. One or more of the framework sequences may be the following:

(SEQ ID NO: 4)

HC-FR1 is [sequence omitted]

(SEQ ID NO: 5)

HC-FR2 is WVRQAPGKGLEWV

(SEQ ID NO: 6)

HC-FR3 is RFTISADTSKNTAYLQMNSLRAEDTAVYYCAR

(SEQ ID NO: 7)

HC-FR4 is WGQGTLVTVSA.

[0136] The heavy chain polypeptide may be in combination with a variable region light chain comprising an HVR-L1, HVR-L2 and HVR-L3, wherein:

(SEQ ID NOs: 8)

(a) the HVR-L1 sequence is RASQX4X5X6TX7X8A;

(SEQ ID NOs: 9)

(b) the HVR-L2 sequence is SASX9LX10S,;
and

(SEQ ID NOs: 10)

(c) the HVR-L3 sequence is QQX11X12X13X14PX15T;

further wherein: X4 is D or V; X5 is V or I; X6 is S or N; X7 is A or F; X8 is V or L; X9 is F or T; X10 is Y or A; X11 is Y, G, F, or S; X12 is L, Y, F or W; X13 is Y, N, A, T, G, F or I; X14 is H, V, P, T or I; X15 is A, W, R, P or T.

[0137] X4 may be D; X5 may be V; X6 may be S; X7 may be A; X8 may be V; X9 may be F; X10 may be Y; X11 may be Y; X12 may be L; X13 may be Y; X14 may be H; X15 may be A.

[0138] The polypeptide may further comprise variable region light chain framework sequences juxtaposed between the HVRs according to the formula: (LC-FR1)-(HVR-L1)-(LC-FR2)-(HVR-L2)-(LC-FR3)-(HVR-L3)-(LC-FR4). The framework sequences may be derived from human consensus framework sequences. The framework sequences may be VL kappa I consensus framework. One or more of the framework sequences may be the following:

(SEQ ID NO: 11)

LC-FR1 is DIQMTQSPSSLSASVGDRVTITC;

(SEQ ID NO: 12)

LC-FR2 is WYQQKPGKAPKLLIY;

(SEQ ID NO: 13)

LC-FR3 is GVPSRFSGSGSGTDFTLTISSLQPEDFATYYC;

(SEQ ID NO: 14)

LC-FR4 is FGQGTKVEIKR.

[0139] The anti-PD-L1 antibody (or an antigen binding fragment thereof) may comprise a heavy chain and a light chain variable region sequence, wherein:

(a) the heavy chain comprises an HVR-H1, HVR-H2 and HVR-H3, wherein further:

(SEQ ID NO: 1)

(i) the HVR-H1 sequence is GFTFSX1SWIH;

(SEQ ID NO: 2)

(ii) the HVR-H2 sequence is AWIX2PYGGSX3YYADSVKG;

(SEQ ID NO: 3)

(iii) the HVR-H3 sequence is RHWPGGFDY,;
and

(b) the light chain comprises an HVR-L1, HVR-L2 and HVR-L3, wherein further:

(SEQ ID NOs: 8)

(iv) the HVR-L1 sequence is RASQX4X5X6TX7X8A;

(SEQ ID NOs: 9)

(v) the HVR-L2 sequence is SASX9LX10S;

(SEQ ID NOs: 10)

(vi) the HVR-L3 sequence is QQX11X12X13X14PX15T;

[0140] wherein: X1 is D or G; X2 is S or L; X3 is T or S; X4 may be D or V; X5 may be V or I; X6 may be S or N; X7 may be A or F; X8 may be V or L; X9 may be F or T; X10 may be Y or A; X11 may be Y, G, F, or S; X12 may be L, Y, F or W; X13 may be Y, N, A, T, G, F or I; X14 may be H, V, P, T or I; X15 may be A, W, R, P or T.
   X1 may be D; X2 may be S and X3 may be T. Furthermore, the positions may be as follows: X4=D, X5=V, X6=S, X7=A and X8=V, X9=F, and X10=Y, X11=Y, X12=L, X13=Y, X14=H and/or X15=A. Furthermore, the positions may be as follows: X1=D, X2=S and X3=T, X4=D, X5=V, X6=S, X7=A and X8=V, X9=F, and X10=Y, X11=Y, X12=L, X13=Y, X14=H and X15=A.

[0141] The antibody (an antigen binding fragment thereof) may further comprise

(a) variable region heavy chain framework sequences juxtaposed between the HVRs according to the formula: (HC-FR1)-(HVR-H1)-(HC-FR2)-(HVR-H2)-(HC-FR3)-(HVR-H3)-(HC-FR4), and
(b) variable region light chain framework sequences juxtaposed between the HVRs according to the formula: (LC-FR1)-(HVR-L1)-(LC-FR2)-(HVR-L2)-(LC-FR3)-(HVR-L3)-(LC-FR4). The framework sequences may be derived from human consensus framework sequences.

[0142] The variable region heavy chain framework sequences may be VH subgroup III consensus framework. One or more of the framework sequences may be the following:

(SEQ ID NO: 4)

HC-FR1 is [sequence omitted];

(SEQ ID NO: 5)

HC-FR2 is WVRQAPGKGLEWV;

(SEQ ID NO: 6)

HC-FR3 is RFTISADTSKNTAYLQMNSLRAEDTAVYYCAR;

(SEQ ID NO: 7)

HC-FR4 is WGQGTLVTVSA.

[0143] The variable region light chain framework sequences may be VL kappa I consensus framework. One or more of the framework sequences may be the following:

(SEQ ID NO: 11)

LC-FR1 is DIQMTQSPSSLSASVGDRVTITC;

(SEQ ID NO: 12)

LC-FR2 is WYQQKPGKAPKLLIY;

(SEQ ID NO: 13)

LC-FR3 is GVPSRFSGSGSGTDFTLTISSLQPEDFATYYC,;
and

(SEQ ID NO: 14)

LC-FR4 is FGQGTKVEIKR.

[0144] The antibody (or antigen binding fragment thereof) may be or may comprise

(a) the variable heavy chain framework sequences are the following:

(SEQ ID NO: 4)

(i) HC-FR1 is [sequence omitted];

(SEQ ID NO: 5)

(ii) HC-FR2 is WVRQAPGKGLEWV;

(SEQ ID NO: 6)

(iii) HC-FR3 is RFTISADTSKNTAYLQMNSLRAEDTAVYYCAR;

(SEQ ID NO: 7)

(iv) HC-FR4 is WGQGTLVTVSA;;
and

(b) the variable light chain framework sequences are the following:

(SEQ ID NO: 11)

(i) LC-FR1 is DIQMTQSPSSLSASVGDRVTITC;

(SEQ ID NO: 12)

(ii) LC-FR2 is WYQQKPGKAPKLLIY;

(SEQ ID NO: 13)

(iii) LC-FR3 is GVPSRFSGSGSGTDFTLTISSLQPEDFATYYC;

(SEQ ID NO: 14)

(iv) LC-FR4 is FGQGTKVEIKR.

[0145] The antibody (or fragment thereof) may further comprise a human constant region. The constant region may selected from the group consisting of IgG1, IgG2, IgG3 and IgG4. The constant region may be IgG1. The antibody (or fragment thereof) may further comprise murine constant region. The constant region may be selected from the group consisting of IgG1, IgG2A, IgG2B and IgG3. The constant region may be IgG2A.

[0146] The antibody (or fragment thereof) may have reduced or minimal effector function. The minimal effector function may result from an effector-less Fc mutation. The effector-less Fc mutation may be N297A. The effector-less Fc mutation may be D265A/N297A. The minimal effector function may result from a glycosylation.

[0147] The antibody (or fragment thereof) may comprise a heavy chain and a light chain variable region sequence, wherein:

(a) the heavy chain comprises an HVR-H1, HVR-H2 and an HVR-H3, having at least 85% overall sequence identity to GFTFSDSWIH (SEQ ID NO:15), AWISPYGGSTYYADSVKG (SEQ ID NO:16) and RHWPGGFDY (SEQ ID NO:3), respectively, and
(b) the light chain comprises an HVR-L1, HVR-L2 and an HVR-L3, having at least 85% overall sequence identity to RASQDVSTAVA (SEQ ID NO:17), SASFLYS (SEQ ID NO:18) and QQYLYHPAT (SEQ ID NO:19), respectively.

[0148] The sequence identity may be at least 90%.

[0149] The antibody (or fragment thereof) may further comprise:

(a) variable region heavy chain (VH) framework sequences juxtaposed between the HVRs according to the formula: (HC-FR1)-(HVR-H1)-(HC-FR2)-(HVR-H2)-(HC-FR3)-(HVR-H3)-(HC-FR4), and
(b) variable region light chain (VL) framework sequences juxtaposed between the HVRs according to the formula: (LC-FR1)-(HVR-L1)-(LC-FR2)-(HVR-L2)-(LC-FR3)-(HVR-L3)-(LC-FR4).

[0150] The antibody (or fragment thereof) may further comprise a VH and VL framework region derived from a human consensus sequence. The VH framework sequence may be derived from a Kabat subgroup I, II, or III sequence. The VH framework sequence may be a Kabat subgroup III consensus framework sequence. The VH framework sequences may be the following:

(SEQ ID NO: 4)

HC-FR1 is [sequence omitted];

(SEQ ID NO: 5)

HC-FR2 is WVRQAPGKGLEWV;

(SEQ ID NO: 6)

HC-FR3 is RFTISADTSKNTAYLQMNSLRAEDTAVYYCAR;

(SEQ ID NO: 7)

HC-FR4 is WGQGTLVTVSA.

[0151] The VL framework sequence may be derived from a Kabat kappa I, II, III or IV subgroup sequence. The VL framework sequence may be a Kabat kappa I consensus framework sequence.

[0152] The VL framework sequences may be the following:

(SEQ ID NO: 11)

LC-FR1 is DIQMTQSPSSLSASVGDRVTITC;

(SEQ ID NO: 12)

LC-FR2 is WYQQKPGKAPKLLIY;

(SEQ ID NO: 13)

LC-FR3 is GVPSRFSGSGSGTDFTLTISSLQPEDFATYYC;

(SEQ ID NO: 14)

LC-FR4 is FGQGTKVEIKR.

[0153] The antibody (or fragment thereof) may comprise a heavy chain and a light chain variable region sequence, wherein:

(a) the heavy chain sequence has at least 85% sequence identity to the heavy chain sequence: EVQLVESGGGLVQPGGSLRLSCAASGFTFSDSWIHWVRQAPG KGLEWVAWISPYGGSTYYADSVKGRFTISADTSKNTAYLQMNSLRAEDTAVYYCAR RHWPGGFDYWGQGTLVTVSA (SEQ ID NO:20), and
(b) the light chain sequence has at least 85% sequence identity to the light chain sequence: DIQMTQSPSSLSASVGDRVTITCRASQDVSTAVAWYQQKPGK APKLLIYSASFLYSGVPSRFSGSGSGTDFTLTISSLQPEDFATYYCQQYLYH PATFGQGTKVEIKR (SEQ ID NO:21).

[0154] The sequence identity may be at least 90%.

[0155] The antibody (or fragment thereof) may comprise a heavy chain and light chain variable region sequence, wherein:

(a) the heavy chain comprises the sequence: EVQLVESGGGLVQPGGSLRLS CAASGFTFSDSWIHWVRQAPGKGLEWVAWISPYGGSTYYADSVKGRFTISADTSKN TAYLQMNSLRAEDTAVYYCARRHWPGGFDYWGQGTLVTVSA (SEQ ID NO:20), and
(b) the light chain comprises the sequence: DIQMTQSPSSLSASVGDRVTITC RASQDVSTAVAWYQQKPGKAPKLLIYSASFLYSGVPSRFSGSGSGTDFTLTISSLQPE DFATYYCQQYLYHPATFGQGTKVEIKR (SEQ ID NO:21).

[0156] Moreover, the anti-PD-L1 antibody may be encoded by a nucleic acid. Accordingly, herein described is an isolated nucleic acid encoding the above polypeptide/antibody (or fragment thereof).

[0157] Provided herein is an isolated nucleic acid encoding a light chain or a heavy chain variable sequence of an anti-PD-L1 antibody or antigen binding fragment, wherein:

(a) the heavy chain further comprises and HVR-H1, HVR-H2 and an HVR-H3 sequence having at least 85% sequence identity to GFTFSDSWIH (SEQ ID NO:15), AWISPYGGSTYYADSVKG (SEQ ID NO:16) and RHWPGGFDY (SEQ ID NO:3), respectively, or
(b) the light chain further comprises an HVR-L1, HVR-L2 and an HVR-L3 sequence having at least 85% sequence identity to RASQDVSTAVA (SEQ ID NO:17), SASFLYS (SEQ ID NO:18) and QQYLYHPAT (SEQ ID NO:19), respectively.

[0158] The sequence identity may be 90%. The anti-PD-L1 antibody may further comprise a VL and a VH framework region derived from a human consensus sequence. The VH sequence may be derived from a Kabat subgroup I, II, or III sequence. The VL sequence may be derived from a Kabat kappa I, II, III or IV subgroup sequence. The anti-PD-L1 antibody may comprise a constant region derived from a murine antibody. The anti-PD-L1 antibody may comprise a constant region derived from a human antibody. The constant region may be IgG1. The antibody encoded by the nucleic acid may have reduced or minimal effector function. The minimal effector function may result from an effector-less Fc mutation. The effector-less Fc mutation may be N297A.

[0159] Further provided herein is a vector comprising the nucleic acid, a host cell comprising the vector. The host cell may be eukaryotic. The host cell may be mammalian. The host cell may be a Chinese Hamster Ovary (CHO) cell. The host cell may be prokaryotic. The host cell may be E. coli. Also provided herein is a process for making an anti-PD-L1 antibody comprising culturing the above host cell under conditions suitable for the expression of the vector encoding the anti-PD-L1 antibody or antigen binding fragment, and recovering the antibody or fragment.

[0160] The following describes in more detail the herein provided means and methods for treating a cancer and/or a cancer patient.

[0161] Herein contemplated is, accordingly, a pharmaceutical composition comprising a modulator of the HER2/neu (ErbB2) signaling pathway (like Trastuzumab), and an inhibitor of programmed death ligand 1 (PD-L1) (like the anti-PD-L1 antibody described herein) for use in the treatment of cancer, whereby said cancer is determined to have a low or absent ER expression level and to have an increased expression level of programmed death ligand 1 (PD-L1) in comparison to a control. The cancer may be determined to have a decreased expression level of interferon-gamma (IFNγ) in comparison to the control. The pharmaceutical composition may further comprise a chemotherapeutic agent (like taxol or a taxol derivative, such as dodetaxel (Taxotere®)).

[0162] In accordance with the above, the present invention provides a method for treating cancer comprising administering an effective amount of a modulator of the HER2/neu (ErbB2) signaling pathway, a chemotherapeutic agent and an inhibitor of programmed death ligand 1 (PD-L1) to a subject in need thereof. The cancer may be determined to have a decreased expression level of interferon-gamma (IFNγ) in comparison to the control.

[0163] Herein provided is a modulator of the HER2/neu (ErbB2) signaling pathway, and an inhibitor of programmed death ligand 1 (PD-L1) for use in the treatment of cancer, whereby said cancer is determined to have a low or absent ER expression level and to have an increased expression level of programmed death ligand 1 (PD-L1) in comparison to a control. Moreover, herein provided is a modulator of the HER2/neu (ErbB2) signaling pathway, an inhibitor of programmed death ligand 1 (PD-L1) and a chemotherapeutic agent (like taxol or a taxol derivative, such as dodetaxel (Taxotere®)) for use in the treatment of cancer, whereby said cancer is determined to have a low or absent ER expression level and to have an increased expression level of programmed death ligand 1 (PD-L1) in comparison to a control. The cancer may be determined to have a decreased expression level of interferon-gamma (IFNγ) in comparison to the control.

[0164] As discussed above, the present invention provides a method of treating a cancer in a cancer patient for whom therapy comprising a modulator of the HER2/neu (ErbB2) signaling pathway and a chemotherapeutic agent is contemplated, the method comprising selecting a cancer patient whose cancer is determined to have a low or absent ER expression level and to have an increased expression level of programmed death ligand 1 (PD-L1) in comparison to a control, and administering to the patient an effective amount of a modulator of the HER2/neu (ErbB2) signaling pathway, of a chemotherapeutic agent and of a programmed death ligand 1 (PD-L1) inhibitor. Likewise, the present invention provides a method of treating a cancer in a cancer patient who is undergoing therapy comprising a modulator of the HER2/neu (ErbB2) signaling pathway and a chemotherapeutic agent, the method comprising selecting a cancer patient whose cancer is determined to have a low or absent ER expression level and to have an increased expression level of programmed death ligand 1 (PD-L1) in comparison to a control, and administering to the patient an effective amount of a programmed death ligand 1 (PD-L1) inhibitor.

[0165] The explanations and definitions given herein above in relation to “cancer”, “cancer patient”, “PD-L1 inhibitor”, “PD-L1 inhibitor therapy”, “modulator of the HER2/neu (ErbB2) signaling pathway”, “chemotherapeutic agent”, “low or absent ER expression level” “increased expression level of programmed death ligand 1 (PD-L1)”, “decreased expression level of interferon-gamma (IFN-γ) and the like apply, mutatis mutandis, in the context of the herein.

[0166] The terms “treatment”, “treating” and the like are used herein to generally mean obtaining a desired pharmacological and/or physiological effect. The effect may be prophylactic in terms of completely or partially preventing a disease or symptom thereof and/or may be therapeutic in terms of partially or completely curing a disease and/or adverse effect attributed to the disease. The term “treatment” as used herein covers any treatment of a disease in a patient and includes: (a) preventing a disease related in a patient which may be predisposed to the disease; (b) inhibiting the disease, i.e. arresting its development; or (c) relieving the disease, i.e. causing regression of the disease.

[0167] A “patient” for the purposes of the present invention includes both humans and other animals, particularly mammals, and other organisms. Thus, the methods are applicable to both human therapy and veterinary applications. Preferably, the patient is human.

[0168] The below explanations relate in more detail to the treatment/therapy of these patients/this patient group in accordance with the present invention.

[0169] The pharmaceutical composition will be formulated and dosed in a fashion consistent with good medical practice, taking into account the clinical condition of the individual patient, the site of delivery of the pharmaceutical composition, the method of administration, the scheduling of administration, and other factors known to practitioners. The “effective amount” of the pharmaceutical composition for purposes herein is thus determined by such considerations.

[0170] The skilled person knows that the effective amount of one of the herein described PD-L1 inhibitor(s), modulator(s) of the HER2/neu (ErbB2) signaling pathway and chemotherapeutic agent(s) in a pharmaceutical composition administered to an individual will, inter alia, depend on the nature of the compound. For example, if said compound is a (poly)peptide or protein the total pharmaceutically effective amount of pharmaceutical composition administered parenterally per dose will be in the range of about 1 μg protein/kg/day to 10 mg protein/kg/day of patient body weight, although, as noted above, this will be subject to therapeutic discretion. More preferably, this dose is at least 0.01 mg protein/kg/day, and most preferably for humans between about 0.01 and 1 mg protein/kg/day.

[0171] The following administration may be employed in respect of Trastuzumab:

### Posology and Method of Administration

[0172] HER2 testing is mandatory prior to initiation of therapy. Herceptin treatment should only be initiated by a physician experienced in the administration of cytotoxic chemotherapy.

### MBC

### Three-Weekly Schedule

[0173] The recommended initial loading dose is 8 mg/kg body weight. The recommended maintenance dose at three-weekly intervals is 6 mg/kg body weight, beginning three weeks after the loading dose.

### Weekly Schedule

[0174] The recommended initial loading dose of Herceptin is 4 mg/kg body weight. The recommended weekly maintenance dose of Herceptin is 2 mg/kg body weight, beginning one week after the loading dose.

Administration in Combination with Paclitaxel or Docetaxel

[0175] In the pivotal trials (H0648g, M77001), paclitaxel or docetaxel was administered the day following the first dose of Herceptin (for dose, see the Summary of Product Characteristics for paclitaxel or docetaxel) and immediately after the subsequent doses of Herceptin if the preceding dose of Herceptin was well tolerated.

Administration in Combination with an Aromatase Inhibitor

[0176] In the pivotal trial (BO16216) Herceptin and anastrozole were administered from day 1. There were no restrictions on the relative timing of Herceptin and anastrozole at administration (for dose, see the Summary of Product Characteristics for anastrozole or other aromatase inhibitors).

### EBC

### Three-Weekly and Weekly Schedule

[0177] As a three-weekly regimen the recommended initial loading dose of Herceptin is 8 mg/kg body weight. The recommended maintenance dose of Herceptin at three-weekly intervals is 6 mg/kg body weight, beginning three weeks after the loading dose.

[0178] As a weekly regimen (initial loading dose of 4 mg/kg followed by 2 mg/kg every week) concomitantly with paclitaxel following chemotherapy with doxorubicin and cyclophosphamide. (See section 5.1 for chemotherapy combination dosing).

### MGC

### Three-Weekly Schedule

[0179] The recommended initial loading dose is 8 mg/kg body weight. The recommended maintenance dose at three-weekly intervals is 6 mg/kg body weight, beginning three weeks after the loading dose. Breast Cancer (MBC and EBC) and Gastric Cancer (MGC)

### Duration of Treatment

[0180] Patients with MBC or MGC should be treated with Herceptin until progression of disease. Patients with EBC should be treated with Herceptin for 1 year or until disease recurrence, whatever occurs first.

### Dose Reduction

[0181] No reductions in the dose of Herceptin were made during clinical trials. Patients may continue therapy during periods of reversible, chemotherapy-induced myelosuppression but they should be monitored carefully for complications of neutropenia during this time. Refer to the Summary of Product Characteristics for paclitaxel, docetaxel or aromatase inhibitor for information on dose reduction or delays.

### Missed Doses

[0182] If the patient misses a dose of Herceptin by one week or less, then the usual maintenance dose (weekly regimen: 2 mg/kg; three-weekly regimen: 6 mg/kg) should be given as soon as possible. Do not wait until the next planned cycle. Subsequent maintenance doses (weekly regimen: 2 mg/kg; three-weekly regimen: 6 mg/kg respectively) should then be given according to the previous schedule.

[0183] If the patient misses a dose of Herceptin by more than one week, a re-loading dose of Herceptin should be given over approximately 90 minutes (weekly regimen: 4 mg/kg; three-weekly regimen: 8 mg/kg). Subsequent Herceptin maintenance doses (weekly regimen: 2 mg/kg; three-weekly regimen 6 mg/kg respectively) should then be given (weekly regimen: every week; three-weekly regimen every 3 weeks) from that point.

### Special Patient Populations

[0184] Clinical data show that the disposition of Herceptin is not altered based on age or serum creatinine. In clinical trials, elderly patients did not receive reduced doses of Herceptin. Dedicated pharmacokinetic studies in the elderly and those with renal or hepatic impairment have not been carried out. However in a population pharmacokinetic analysis, age and renal impairment were not shown to affect trastuzumab disposition.

### Method of Administration

[0185] Herceptin loading dose should be administered as a 90-minute intravenous infusion. Do not administer as an intravenous push or bolus. Herceptin intravenous infusion should be administered by a health-care provider prepared to manage anaphylaxis and an emergency kit should be available. Patients should be observed for at least six hours after the start of the first infusion and for two hours after the start of the subsequent infusions for symptoms like fever and chills or other infusion-related symptoms (see sections 4.4 and 4.8). Interruption or slowing the rate of the infusion may help control such symptoms. The infusion may be resumed when symptoms abate.

[0186] If the initial loading dose was well tolerated, the subsequent doses can be administered as a 30-minute infusion. Pharmaceutical compositions of the invention may be administered parenterally. Pharmaceutical compositions of the invention preferably comprise a pharmaceutically acceptable carrier. By “pharmaceutically acceptable carrier” is meant a non-toxic solid, semisolid or liquid filler, diluent, encapsulating material or formulation auxiliary of any type. The term “parenteral” as used herein refers to modes of administration which include intravenous, intramuscular, intraperitoneal, intrasternal, subcutaneous and intraarticular injection and infusion. The administration of the herein provided compositions may, inter alia, comprise an administration twice daily, every day, every other day, every third day, every forth day, every fifth day, once a week, once every second week, once every third week, once every month, etc.

[0187] The pharmaceutical composition is also suitably administered by sustained release systems. Suitable examples of sustained-release compositions include semi-permeable polymer matrices in the form of shaped articles, e.g., films, or mirocapsules. Sustained-release matrices include polylactides (U.S. Pat. No. 3,773,919, EP 58,481), copolymers of L-glutamic acid and gamma-ethyl-L-glutamate (Sidman, U. et al., Biopolymers 22:547-556 (1983)), poly (2-hydroxyethyl methacrylate) (R. Langer et al., J. Biomed. Mater. Res. 15:167-277 (1981), and R. Langer, Chem. Tech. 12:98-105 (1982)), ethylene vinyl acetate (R. Langer et al., Id.) or poly-D-(−)-3-hydroxybutyric acid (EP 133,988). Sustained release pharmaceutical composition also include liposomally entrapped compound. Liposomes containing the pharmaceutical composition are prepared by methods known per se: U.S. Pat. No. DE 3,218,121; Epstein et al., Proc. Natl. Acad. Sci. (USA) 82:3688-3692 (1985); Hwang et al., Proc. Natl. Acad. Sci. (USA) 77:4030-4034 (1980); EP 52,322; EP 36,676; EP 88,046; EP 143,949; EP 142,641; Japanese Pat. Appl. 83-118008; U.S. Pat. Nos. 4,485,045 and 4,544,545; and EP 102,324. Ordinarily, the liposomes are of the small (about 200-800 Angstroms) unilamellar type in which the lipid content is greater than about 30 mol. percent cholesterol, the selected proportion being adjusted for the optimal therapy.

[0188] For parenteral administration, the pharmaceutical composition is formulated generally by mixing it at the desired degree of purity, in a unit dosage injectable form (solution, suspension, or emulsion), with a pharmaceutically acceptable carrier, i.e., one that is non-toxic to recipients at the dosages and concentrations employed and is compatible with other ingredients of the formulation.

[0189] Generally, the formulations are prepared by contacting the components of the pharmaceutical composition uniformly and intimately with liquid carriers or finely divided solid carriers or both. Then, if necessary, the product is shaped into the desired formulation. Preferably the carrier is a parenteral carrier, more preferably a solution that is isotonic with the blood of the recipient. Examples of such carrier vehicles include water, saline, Ringer's solution, and dextrose solution. Non aqueous vehicles such as fixed oils and ethyl oleate are also useful herein, as well as liposomes. The carrier suitably contains minor amounts of additives such as substances that enhance isotonicity and chemical stability. Such materials are non-toxic to recipients at the dosages and concentrations employed, and include buffers such as phosphate, citrate, succinate, acetic acid, and other organic acids or their salts; antioxidants such as ascorbic acid; low molecular weight (less than about ten residues) (poly)peptides, e.g., polyarginine or tripeptides; proteins, such as serum albumin, gelatin, or immunoglobulins; hydrophilic polymers such as polyvinylpyrrolidone; amino acids, such as glycine, glutamic acid, aspartic acid, or arginine; monosaccharides, disaccharides, and other carbohydrates including cellulose or its derivatives, glucose, manose, or dextrins; chelating agents such as EDTA; sugar alcohols such as mannitol or sorbitol; counterions such as sodium; and/or nonionic surfactants such as polysorbates, poloxamers, or PEG.

[0190] The components of the pharmaceutical composition to be used for therapeutic administration must be sterile. Sterility is readily accomplished by filtration through sterile filtration membranes (e.g., 0.2 micron membranes). Therapeutic components of the pharmaceutical composition generally are placed into a container having a sterile access port, for example, an intravenous solution bag or vial having a stopper pierceable by a hypodermic injection needle.

[0191] The components of the pharmaceutical composition ordinarily will be stored in unit or multi-dose containers, for example, sealed ampoules or vials, as an aqueous solution or as a lyophilized formulation for reconstitution. As an example of a lyophilized formulation, 10-ml vials are filled with 5 ml of sterile-filtered 1% (w/v) aqueous solution, and the resulting mixture is lyophilized. The infusion solution is prepared by reconstituting the lyophilized compound(s) using bacteriostatic Water-for-Injection.

[0192] The herein provided treatment of cancer comprising a the modulator of the HER2/neu (ErbB2) signaling pathway, an inhibitor of programmed death ligand 1 (PD-L1) and a chemotherapeutic agent (like taxol or a taxol derivative, such as dodetaxel (Taxotere®)) may be performed by way of the simultaneous, sequential or separate administration of the individual components of said treatment. For example, one or more of the modulator(s) of the HER2/neu (ErbB2) signaling pathway as defined herein (like Trastuzumab) may be administered simultaneously with one or more of the herein defined inhibitor(s) of programmed death ligand 1 (PD-L1) (like the herein provided and described anti-PD-L1 antibodies). Also sequential administration of the modulator(s) of the HER2/neu (ErbB2) signaling pathway as defined herein (like Trastuzumab) may be administered simultaneously with one or more of the herein defined inhibitor(s) of programmed death ligand 1 (PD-L1) (like the herein provided and described anti-PD-L1 antibodies) to be used in accordance with the present invention is envisaged herein. The herein defined modulators of the HER2/neu (ErbB2) signaling pathway as defined herein (like Trastuzumab) and the one or more of the herein defined inhibitor of programmed death ligand 1 (PD-L1) (like the herein provided and described anti-PD-L1 antibodies) may also be administered separately. For example, one or more of the modulator(s) of the HER2/neu (ErbB2) signaling pathway as defined herein (like Trastuzumab) may be administered in a first step followed by administration in a second step with one or more of the inhibitor(s) of programmed death ligand 1 (PD-L1) (like the herein provided and described anti-PD-L1 antibodies) and vice versa. Likewise, the chemotherapeutic agent may be administered simultaneously, sequentially or separately. Any combination of simultaneous, sequential or separate administration of the modulator(s) of the HER2/neu (ErbB2) signaling pathway, inhibitor(s) of programmed death ligand 1 (PD-L1) and chemotherapeutic agent(s) (like taxol or a taxol derivative, such as dodetaxel (Taxotere®)) is envisaged herein.

[0193] The herein provided treatment of cancer comprising a the modulator of the HER2/neu (ErbB2) signaling pathway, an inhibitor of programmed death ligand 1 (PD-L1) and a chemotherapeutic agent (like taxol or a taxol derivative, such as dodetaxel (Taxotere®)) can be applied as a sole therapy. It may, however, also be applied with one or more additional therapies (i.e. in a further cotherapy with), for example, conventional therapies like surgery, radiotherapy and/or one or more additional chemotherapeutic agents.

[0194] Surgery may comprise the step of partial or complete tumour resection, prior to, during or after the administration of the herein provided cancer treatment comprising a modulator of the HER2/neu (ErbB2) signaling pathway, an inhibitor of programmed death ligand 1 (PD-L1) and a chemotherapeutic agent (like taxol or a taxol derivative, such as dodetaxel (Taxotere®)). The herein provided modulator of the HER2/neu (ErbB2) signaling pathway, inhibitor of programmed death ligand 1 (PD-L1) and chemotherapeutic agent (like taxol or a taxol derivative, such as dodetaxel (Taxotere®)) may be administered in a neoadjuvant or adjuvant setting (in particular neoadjuvant or adjuvant treatment of cancer).

[0195] The modulator of the HER2/neu (ErbB2) signaling pathway, the chemotherapeutic agent and the inhibitor of programmed death ligand 1 (PD-L1) can be administered in a neoadjuvant setting. The modulator of the HER2/neu (ErbB2) signaling pathway, the chemotherapeutic agent and the inhibitor of programmed death ligand 1 (PD-L1) can be administered in an adjuvant setting or in a metastatic setting.

[0196] Accordingly, the herein provided modulator of the HER2/neu (ErbB2) signaling pathway, an inhibitor of programmed death ligand 1 (PD-L1) and a chemotherapeutic agent (like taxol or a taxol derivative, such as dodetaxel (Taxotere®)) may be administered to a patient in need of such a treatment during or after a surgical intervention/resection of the cancerous tissue. Therefore, the present invention is useful in neoadjuvant therapy, i.e. the treatment with the herein provided therapy given to a patient/patient group in need thereof prior to surgery. It is also useful in adjuvant therapy (i.e. after surgery).

[0197] The chemotherapeutic agent to be used herein is preferably a taxane (the term “taxol” is used interchangeably herein with “taxane”) or a taxane derivate (taxol derivative), like dodetaxel (Taxotere®) or paclitaxel. The use of dodetaxel/(Taxotere®) is particularly preferred herein.

[0198] The (additional) chemotherapeutic agent(s) may be one or more of the following exemplary, non-limiting, drugs or agents:

[0199] Cisplatin, Vinorelbin, Carboplatin, Paclitaxel, Gemcitabin, Docetaxel, Bevacizumab, Pemetrexed, Etoposid, Irinotecan, Ifosfamid, Topotecan,

[0200] (an) anti-angiogenic agent(s) like a VEGF blocker (such as bevacizumab/Avastin or sutent (sunitinib malate-SU-11248)), linomide, inhibitors of integrin αvβ3 function, angiostatin, razoxin, thalidomide, and including vascular targeting agents (for example combretastatin phosphate or N-acetylcolchinol-O-phosphate));

[0201] (an) cytostatic agent(s) such as antioestrogens (for example tamoxifen, toremifene, raloxifene, droloxifene, iodoxyfene), progestogens (for example megestrol acetate), aromatase inhibitors (for example anastrozole, letrazole, vorazole, exemestane), antiprogestogens, antiandrogens (for example flutamide, nilutamide, bicalutamide, cyproterone acetate), LHRH agonists and antagonists (for example goserelin acetate, luprolide), inhibitors of testosterone 5α-dihydroreductase (for example finasteride), anti-invasion agents (for example metalloproteinase inhibitors like marimastat and inhibitors of urokinase plasminogen activator receptor function) and inhibitors of growth factor function, (such growth factors include for example platelet derived growth factor and hepatocyte growth factor such inhibitors include growth factor antibodies, growth factor receptor antibodies, tyrosine kinase inhibitors and serine/threonine kinase inhibitors);

[0202] biological response modifiers (for example interferon); (an) anti-metabolite agent(s) (for example gemcitabine); (an) anti-hormonal compound(s) such as (an) anti-estrogen(s); antibodies (for example edrecolomab); adjuvant (anti-) hormonal therapy/therapies (i.e. therapy with (an) adjuvant (anti-) hormone drug(s), such as tamoxifen; gene therapy approaches (like antisense therapies); and/or immunotherapy approaches.

[0203] The chemotherapy may also (additionally) include the use of one or more of antiproliferative/antineoplastic drugs and combinations thereof, as used in medical oncology, such as (an) tyrosine kinase inhibitor(s), (a) raf inhibitor(s), (a) ras inhibitor(s), (a) dual tyrosine kinase inhibitor(s), taxol, (an) taxane(s) (like paclitaxel or docetaxel), (an) anthracycline(s), like doxorubicin or epirubicin, aromatase inhibitors (such as anastrozole or letrozole) and/or vinorelbine; cyclophosphamide, methotrexate or fluorouracil (which is also known as 5-FU) can be used in such cotherapy individually or in form of a cotherapy comprising these three drugs (“CMF therapy”), optionally in combination with any of the other herein provided additional therapies. Particular examples of chemotherapeutic agents for use with a combination treatment of the present invention are pemetrexed, raltitrexed, etoposide, vinorelbine, paclitaxel, docetaxel, cisplatin, oxaliplatin, carboplatin, gemcitabine, irinotecan (CPT-1 1), 5-fluorouracil (5-FU, (including capecitabine)), doxorubicin, cyclophosphamide, temozolomide, hydroxyurea, (iii) antiproliferative/antineoplastic drugs and combinations thereof, as used in medical oncology, such as antimetabolites (for example antifolates like methotrexate, fluoropyrimidines like 5-fluorouracil, purine and adenosine analogues, cytosine arabinoside); antitumour antibiotics (for example anthracyclines like doxorubicin, daunomycin, epirubicin and idarubicin, mitomycin-C, dactinomycin, mithramycin); platinum derivatives (for example cisplatin, carboplatin); alkylating agents (for example nitrogen mustard, melphalan, chlorambucil, busulphan, cyclophosphamide, ifosfamide, nitrosoureas, thiotepa); antimitotic agents (for example vinca alkaloids like vincristine and taxoids like taxol, taxotere); topoisomerase inhibitors (for example epipodophyllotoxins like etoposide and teniposide, amsacrine, topotecan, and also irinotecan); also enzymes (for example asparaginase); and thymidylate synthase inhibitors (for example raltitrexed); and additional types of chemotherapeutic agents.

[0204] Inhibitors/Modulators/chemotherapeutic agents for use in accordance with the present invention are described herein and refer generally to known and/or commercially available Inhibitors/Modulators/chemotherapeutic. However, also the use of inhibitors yet to be generated or known compounds to be tested for their inhibiting activity is envisaged in context of the present invention.

[0205] In a further aspect, the present invention relates to the use of (a) nucleic acid(s) or antibody(antibodies) capable of detecting the expression level of ER, PD-L1 and, optionally, IFNγ for determining a patient's need for PD-L1 inhibitor cotherapy in combination with a modulator of the HER2/neu (ErbB2) signaling pathway and a chemotherapeutic agent. The respective explanations of said terms have been given above and apply here mutatis mutandis.

[0206] Preferably, the nucleic acid (e.g. oligonucleotide(s)) is (are) about 15 to 100 nucleotides in length. A person skilled in the art is, based on his general knowledge and the teaching provided herein, easily in the position to identify and/or prepare (a) an oligo- or polynucleotide capable of detecting the expression level of ER, PD-L1 and, optionally, IFNγ. In particular these nucleic acid(s) (e.g. oligo- or polynucleotides) may be used as probe(s) in the methods described herein, for example in the measurement of the expression level. A skilled person will know, for example, computer programs which may be useful for the identification of corresponding probes to be used herein. For example, a nucleic acid encoding estrogen receptor (or a part of the nucleic acid) (e.g. SEQ ID NO: 38), a nucleic acid encoding PD-L1 (or a part of the nucleic acid) (e.g. SEQ ID NO: 42) and, optionally, a nucleic acid encoding IFNγ (or a part of the nucleic acid) (e.g. SEQ ID NO: 44 may be used in this context for identifying specific probes for detecting the expression level of ER, PD-L1 and IFNγ, respectively. Exemplary nucleic acid sequences encoding ER, PD-L1 and IFNγ are available on corresponding databases, such as the NCBI database (world wide web at ncbi.nlm.nih.gov/sites/entrez).

[0207] Furthermore, a composition is provided herein which is a diagnostic composition further comprising, optionally, means for detection/determining/evaluating the expression level of ER, PD-L1 and IFNγ. Such means for detection, are, for example, the above-described nucleotides and/or antibodies. Accordingly, the present invention relates to such means (e.g. such nucleotides and/or antibodies) for the preparation of a diagnostic composition for determining a patient in need of a PD-L1 inhibitor cotherapy.

[0208] In an alternative aspect, the present invention relates to such means for detection (e.g the above-described nucleic acids and/or antibodies and/or the “binding molecules” described below in context of the kit to be used in accordance with the present invention) for use in determining a patient in need of a PD-L1 inhibitor cotherapy. Preferably, the present invention relates to (an) antibody/antibodies for use in determining a patient in need of a PD-L1 inhibitor cotherapy.

[0209] Furthermore, the present invention also relates to a kit useful for carrying out the herein provided methods, the kit comprising (a) nucleic acid or (an) antibody capable of detecting the expression level of ER, PD-L1 and, optionally, IFNγ. Also envisaged herein is the use of the herein described kit for carrying out the herein provided methods. Said kit useful for carrying out the methods and uses described herein may comprise oligonucleotides or polynucleotides capable of determining the expression level of ER, PD-L1 and, optionally, IFNγ. For example, said kit may comprise (a) compound(s) required for specifically measuring the expression level of ER, PD-L1 and, optionally, IFNγ. Moreover, the present invention also relates to the use of (a) compound(s) required for specifically measuring the expression level of ER, PD-L1 and, optionally, IFNγ, for the preparation of a kit for carrying out the methods or uses of this invention. On the basis of the teaching of this invention, the skilled person knows which compound(s) is (are) required for specifically measuring the expression level of ER, PD-L1 and, optionally, IFNγ. For example, such compound(s) may be (a) “binding molecule(s)”. Particularly, such compound(s) may be (a) (nucleotide) probe(s), (a) primer(s) (pair(s)), (an) antibody(ies) and/or (an) aptamer(s) specific for a (gene) product of the ER gene/coding sequence, PD-L1 gene/coding sequence and, optionally, IFNγ/coding sequence. The kit (to be prepared in context) of this invention may be a diagnostic kit.

[0210] The kit (to be prepared in context) of this invention or the methods and uses of the invention may further comprise or be provided with (an) instruction manual(s). For example, said instruction manual(s) may guide the skilled person (how) to determine the (reference/control) expression level of ER, PD-L1 and, optionally, IFNγ. or (how) to determine a patient's need of PD-L1 inhibitor therapy. Particularly, said instruction manual(s) may comprise guidance to use or apply the herein provided methods or uses. The kit (to be prepared in context) of this invention may further comprise substances/chemicals and/or equipment suitable/required for carrying out the methods and uses of this invention. For example, such substances/chemicals and/or equipment are solvents, diluents and/or buffers for stabilizing and/or storing (a) compound(s) required for specifically measuring the expression level of ER, PD-L1 and, optionally, IFNγ.

[0211] As used herein, the terms “comprising” and “including” or grammatical variants thereof are to be taken as specifying the stated features, integers, steps or components but do not preclude the addition of one or more additional features, integers, steps, components or groups thereof. This term encompasses the terms “consisting of” and “consisting essentially of” Thus, the terms “comprising”/“including”/“having” mean that any further component (or likewise features, integers, steps and the like) can be present.

[0212] The term “consisting of” means that no further component (or likewise features, integers, steps and the like) can be present.

[0213] The term “consisting essentially of” or grammatical variants thereof when used herein are to be taken as specifying the stated features, integers, steps or components but do not preclude the addition of one or more additional features, integers, steps, components or groups thereof but only if the additional features, integers, steps, components or groups thereof do not materially alter the basic and novel characteristics of the claimed composition, device or method. Thus, the term “consisting essentially of” means that specific further components (or likewise features, integers, steps and the like) can be present, namely those not materially affecting the essential characteristics of the composition, device or method. In other words, the term “consisting essentially of” (which can be interchangeably used herein with the term “comprising substantially”), allows the presence of other components in the composition, device or method in addition to the mandatory components (or likewise features, integers, steps and the like), provided that the essential characteristics of the device or method are not materially affected by the presence of other components.

[0214] The term “method” refers to manners, means, techniques and procedures for accomplishing a given task including, but not limited to, those manners, means, techniques and procedures either known to, or readily developed from known manners, means, techniques and procedures by practitioners of the chemical, biological and biophysical arts.

[0215] As used herein, the term “isolated” refers to a composition that has been removed from its in-vivo location (e.g. aquatic organism or moss). Preferably the isolated compositions of the present invention are substantially free from other substances (e.g., other proteins that do not comprise anti-adhesive effects) that are present in their in-vivo location (i.e. purified or semi-purified.

[0216] As used herein the term “about” refers to ±10%.

[0217] The present invention also relates to the following items:
[0218] 1. A method of determining the need of a cancer patient for a PD-L1 inhibitor cotherapy,
   [0219] (i) wherein therapy comprising a modulator of the HER2/neu (ErbB2) signaling pathway and a chemotherapeutic agent is contemplated for the patient or (ii) wherein the patient is undergoing therapy comprising a modulator of the HER2/neu (ErbB2) signaling pathway and a chemotherapeutic agent, said method comprising the steps of
   [0220] a) measuring in vitro in a sample from said patient the expression level of Estrogen receptor (ER) and of programmed death ligand 1 (PD-L1),
   [0221] b) determining a patient as being in need of a PD-L1 inhibitor cotherapy if a low or absent ER expression level and an expression level of programmed death ligand 1 (PD-L1) that is increased in comparison to a control is measured in step (a).
[0222] 2. A method of treating a cancer in a cancer patient for whom therapy comprising a modulator of the HER2/neu (ErbB2) signaling pathway and a chemotherapeutic agent is contemplated, the method comprising selecting a cancer patient whose cancer is determined to have a low or absent ER expression level and to have an increased expression level of programmed death ligand 1 (PD-L1) in comparison to a control, and administering to the patient an effective amount of a modulator of the HER2/neu (ErbB2) signaling pathway, of a chemotherapeutic agent and of a programmed death ligand 1 (PD-L1) inhibitor.
[0223] 3. A method of treating a cancer in a cancer patient who is undergoing therapy comprising a modulator of the HER2/neu (ErbB2) signaling pathway and a chemotherapeutic agent, the method comprising selecting a cancer patient whose cancer is determined to have a low or absent ER expression level and to have an increased expression level of programmed death ligand 1 (PD-L1) in comparison to a control, and administering to the patient an effective amount of a programmed death ligand 1 (PD-L1) inhibitor.
[0224] 4. A pharmaceutical composition comprising a modulator of the HER2/neu (ErbB2) signaling pathway, and an inhibitor of programmed death ligand 1 (PD-L1) for use in the treatment of cancer, whereby said cancer is determined to have a low or absent ER expression level and to have an increased expression level of programmed death ligand 1 (PD-L1) in comparison to a control.
[0225] 5. The pharmaceutical composition for use in the treatment of cancer of item 4, further comprising a chemotherapeutic agent.
[0226] 6. The method of any one of items 1 to 3, further comprising measuring in vitro in a sample from said patient the expression level of interferon-gamma (IFNγ) and determining a patient as being in need of a PD-L1 inhibitor cotherapy if an expression level of interferon-gamma (IFNγ) that is decreased in comparison to a control is measured.
[0227] 7. The method of any one of items 1, 2, 3 and 6; or the pharmaceutical composition of item 4 and 5, wherein the ER expression level is ER(−).
[0228] 8. The method of any one of items 1, 2, 3, 6 and 7; or the pharmaceutical composition of any one of item 4, 5 and 7, wherein said modulator of the HER2/neu (ErbB2) signaling pathway is the HER2 antibody Herceptin/Trastuzumab.
[0229] 9. The method of any one of items 1, 2, 3, 6, 7 and 8; or the pharmaceutical composition of any one of items 5, 7 and 8, wherein said chemotherapeutic agent is taxol or a taxol derivative.
[0230] 10. The method of any one of items 1, 2, 3, 6, 7 and 8 to 9; or the pharmaceutical composition of any one of items 4, 5 and 7 to 9, wherein said inhibitor of programmed death ligand 1 (PD-L1) is an antibody specifically binding to PD-L1 (anti-PD-L1 antibody).
[0231] 11. The method of any one of items 1, 2, 3, and 6 to 10; or the pharmaceutical composition of any one of items 4, 5 and 7 to 10, wherein said cancer is a solid cancer.
[0232] 12. The method of item 11; or the pharmaceutical composition of item 11, wherein said solid cancer is breast cancer orgastric cancer.
[0233] 13. The method of any one of items 1, 2, 3, and 6 to 12; or the pharmaceutical composition of any one of items 4, 5 and 7 to 12, wherein the expression level of PD-L1 is the mRNA expression level.
[0234] 14. Use of a nucleic acid or antibody capable of detecting the expression level of ER, PD-L1 and, optionally, IFNγ for determining a patient's need for PD-L1 inhibitor cotherapy in combination with a modulator of the HER2/neu (ErbB2) signaling pathway and a chemotherapeutic agent.
[0235] 15. The method of any one of items 1, 2, 3 and 6 to 14; or the pharmaceutical composition of any one of items 4, 5 and 7 to 14, wherein said modulator of the HER2/neu (ErbB2) signaling pathway, said chemotherapeutic agent and said inhibitor of programmed death ligand 1 (PD-L1) are to be administered in a neoadjuvant setting.

[0236] The present invention is further described by reference to the following non-limiting figures and examples. Unless otherwise indicated, established methods of recombinant gene technology were used as described, for example, in Sambrook, Russell “Molecular Cloning, A Laboratory Manual”, Cold Spring Harbor Laboratory, N.Y. (2001)) which is incorporated herein by reference in its entirety.

[0237] The Figures show:

[0238] FIG. 1.

[0239] FIG. 1 provides a schematic of the HER2 protein structure, and amino acid sequences for Domains I-IV, respectively) of the extracellular domain thereof thereof (SEQ ID NOS 22-25, respectively, in order of appearance).

[0240] FIG. 2.

[0241] FIGS. 2A and 2B depict alignments of the amino acid sequences of the variable light (V_{L}) (FIG. 2A) and variable heavy (V_{H}) (FIG. 2B) domains of murine monoclonal antibody 2C4 (SEQ ID Nos. 26 and 27, respectively); V_{L} and V_{H} domains of variant 574/Pertuzumab (SEQ ID Nos. 28 and 29, respectively), and human V_{L} and V_{H} consensus frameworks (hum κ1, light kappa subgroup I; humIII, heavy subgroup III) (SEQ ID Nos. 30 and 31, respectively). Asterisks identify differences between variable domains of Pertuzumab and murine monoclonal antibody 2C4 or between variable domains of Pertuzumab and the human framework. Complementarity Determining Regions (CDRs) are in brackets.

[0242] FIG. 3.

[0243] FIGS. 3A and 3B show the amino acid sequences of Pertuzumab light chain (SEQ ID NO: 32; FIG. 3A) and heavy chain (SEQ ID NO: 33; FIG. 3B). CDRs are shown in bold. Calculated molecular mass of the light chain and heavy chain are 23,526.22 Da and 49,216.56 Da (cysteines in reduced form). The carbohydrate moiety is attached to Asn 299 of the heavy chain.

[0244] FIG. 4.

[0245] FIGS. 4A and 4B show the amino acid sequences of Trastuzumab light chain (SEQ ID NO: 34; FIG. 4A) and heavy chain (SEQ ID NO: 35; FIG. 4B), respectively. Boundaries of the variable light and variable heavy domains are indicated by arrows.

[0246] FIG. 5.

[0247] FIGS. 5A and 5B depict a variant Pertuzumab light chain sequence (SEQ ID NO: 36; FIG. 5A) and a variant Pertuzumab heavy chain sequence (SEQ ID NO: 37; FIG. 5B), respectively.

[0248] FIG. 6A and FIG. 6B.

[0249] Known mRNA transcripts and position of the relevant AFFYMETRIX probe set target regions for gene CD274. Exons are shown as grey bold rectangles, junction regions are indicated by thin horizontal lines. Probe sets with their sequence mapped against mRNA sequences are shown as black bold rectangles. Provided coordinates are genomic coordinates on chromosome 9.

[0250] FIG. 7A and FIG. 7B.

[0251] Known mRNA transcripts and position of the relevant AFFYMETRIX probe set target regions for gene IFNG. Exons are shown as grey bold rectangles, junction regions are indicated by thin horizontal lines. Probe sets with their sequence mapped against mRNA sequences are shown as black bold rectangles. Provided coordinates are genomic coordinates on chromosome 12.

[0252] FIG. 8.

[0253] Distribution of the expression of genes IFNG and CD274 in the samples of ER− and ER− populations. Symbol types correspond to the final pCR status (solid: pCR achieved, open—pCR not achieved).

[0254] FIG. 9.

[0255] FIG. 9A Box plot of expression of gene CD274 for ER− responders (pCR=YES) and non-responders (pCR=NO). On the right the histograms of expression for both categories are provided.

[0256] FIG. 9B Distribution of t-test statistics (HO hypothesis of no difference). The vertical mark indicates the actual value found in the involved sample. The area of the shaded regions corresponds to the alpha level.

[0257] FIG. 10.

[0258] FIG. 10A Box plot of expression of gene IFNG for ER− responders (pCR=YES) and non-responders (pCR=NO). On the right the histograms of expression for both categories are provided.

[0259] FIG. 10B Distribution of t-test statistics (HO hypothesis of no difference). The vertical mark indicates the actual value found in the involved sample. The area of the shaded regions corresponds to the alpha level.

[0260] FIG. 11.

[0261] FIG. 11A Box plot of expression of gene CD274 for ER+ responders (pCR=YES) and non-responders (pCR=NO). On the right the histograms of expression for both categories are provided.

[0262] FIG. 11B Distribution of t-test statistics (HO hypothesis of no difference). The vertical mark indicates the actual value found in the involved sample. The area of the shaded regions corresponds to the alpha level.

[0263] FIG. 12.

[0264] FIG. 12A Box plot of expression of gene IFNG for ER+ responders (pCR=YES) and non-responders (pCR=NO). On the right the histograms of expression for both categories are provided.

[0265] FIG. 12B Distribution of t-test statistics (HO hypothesis of no difference). The vertical mark indicates the actual value found in the involved sample. The area of the shaded regions corresponds to the alpha level.

[0266] FIG. 13.

[0267] Receiver operating characteristic of the final logistic regression model for ER− population. Positive level is taken to be the positive response status (pCR=YES).

[0268] FIG. 14.

[0269] LIFT curve of the final logistic regression model for ER− population. Positive level is taken to be the positive response status (pCR=YES). The Y-axis displays the ratio of how rich the portion of the population is in the chosen response level (upper curve corresponds to pCR=YES) compared to the rate of that response level as a whole.

[0270] FIG. 15.

[0271] An example of predicted clinical response status for ER− population. Shown is predicted profile of response as controlled by patient age, Cancer type, pN status, and expression of both genes involved. The actual predicted pCR probability (which is equal to 0.443) is given for N0 LABC patient around 60 y. old and with expression in both genes around median values.

[0272] FIG. 16.

[0273] Receiver operating characteristic of the final logistic regression model for ER+ population. Positive level is taken to be the positive response status (pCR=YES).

[0274] FIG. 17.

[0275] Distribution of age of ER− patients.

[0276] FIG. 18.

[0277] Distribution of age of ER+ patients.

[0278] FIG. 19.

[0279] Decision tree view on expression of IFNG and CD274 genes predicting clinical response in ER− patients. The first two splits required to explain pCR are the ones wrt to IFNG and CD274.

[0280] The Example illustrates the invention.

### EXAMPLE 1

### Cancer Patients Undergoing HER2 Targeted Therapy and Chemotherapy Benefit from PD-L1 Inhibitor Cotherapy, if the Expression Level of ER is Low or Absent (ER Negative) and if PD-L1 Expression Level is Increased

[0281] Estimation of gene expression was performed with the help of R Bioconductor package ‘affy’, R version 2.15.0. All exploratory analyses and predictive models were made using SAS AV ver. 10.0

[0282] 48 HER2+, ER+ and 39 HER2+, ER− breast cancer biopsies were obtained from NeoSphere clinical trial. The samples had been taken at diagnosis from patients afterwards treated with Docetaxel and Trastuzumab in a neo-adjuvant setting. The distribution of main clinical covariates at base line, as well as of clinical response (as assessed at the surgery) in the involved population is as follows:

### ER Negative Samples:

Patient Age (see FIG. 17)
Quantiles

| | | |
|---|---|---|
| 100.0% | maximum | 72 |
| 99.5% | | 72 |
| 97.5% | | 71.55 |
| 90.0% | | 64 |
| 75.0% | quartile | 54 |
| 50.0% | median | 50.5 |
| 25.0% | quartile | 44.25 |
| 10.0% | | 39 |
| 2.5% | | 34.675 |
| 0.5% | | 34 |
| 0.0% | minimum | 34 |

Cancer Type

| Level | Count | Prob |
|---|---|---|
| IBC | 2 | 0.04167 |
| LABC | 22 | 0.45833 |
| OPERABLE | 24 | 0.50000 |
| Total | 48 | 1.00000 |

pT (pathologic staging of Tumor)

| Level | Count | Prob |
|---|---|---|
| T2 | 18 | 0.37500 |
| T3 | 15 | 0.31250 |
| T4 | 15 | 0.31250 |
| Total | 48 | 1.00000 |

pN (pathologic staging of nodes)

| Level | Count | Prob |
|---|---|---|
| N0 | 12 | 0.25000 |
| N1 | 36 | 0.75000 |
| Total | 48 | 1.00000 |

G (Grade)

| Level | Count | Prob |
|---|---|---|
| G1 | 1 | 0.02083 |
| G2 | 15 | 0.31250 |
| G3 | 16 | 0.33333 |
| NA | 16 | 0.33333 |
| Total | 48 | 1.00000 |

### ER Positive Samples:

Patient Age (see FIG. 18)
Quantiles

| | | |
|---|---|---|
| 100.0% | maximum | 74 |
| 99.5% | | 74 |
| 97.5% | | 74 |
| 90.0% | | 65 |
| 75.0% | quartile | 57 |
| 50.0% | median | 50 |
| 25.0% | quartile | 43 |
| 10.0% | | 40 |
| 2.5% | | 32 |
| 0.5% | | 32 |
| 0.0% | minimum | 32 |

Cancer Type

| Level | Count | Prob |
|---|---|---|
| IBC | 5 | 0.12821 |
| LABC | 8 | 0.20513 |
| OPERABLE | 26 | 0.66667 |
| Total | 39 | 1.00000 |

pT

| Level | Count | Prob |
|---|---|---|
| T2 | 15 | 0.38462 |
| T3 | 16 | 0.41026 |
| T4 | 8 | 0.20513 |
| Total | 39 | 1.00000 |

pN

| Level | Count | Prob |
|---|---|---|
| N0 | 11 | 0.28205 |
| N1 | 28 | 0.71795 |
| Total | 39 | 1.00000 |

G

| Level | Count | Prob |
|---|---|---|
| G2 | 13 | 0.33333 |
| G3 | 10 | 0.25641 |
| NA | 16 | 0.41026 |
| Total | 39 | 1.00000 |

[0285] Contingency Analysis of pathological complete response (pCR) By estrogen receptor status (ER)

| Count | | | |
|---|---|---|---|
| Row % | pCR = NO | pCR = YES | |
| ER = ER− | 27 | 21 | 48 |
| | 56.25 | 43.75 | |
| ER = ER+ | 33 | 6 | 39 |
| | 84.62 | 15.38 | |
| | 60 | 27 | 87 |

### Gene Expression Profiling

[0286] The tumor biopsy samples were profiled for gene expression on AFFYMETRIX HG-U133Plus 2 whole Human Genome microarray platform. Roche HighPure RNA extraction, NuGen amplification and standard AFFYMETRIX hybridization and scanning protocols were used. All array scans passed standard AFFYMETRIX QC.

[0287] Robust Multiarray algorithm (RMA) was used for preprocessing of raw signals (Irizarry et al, 2003. http://www.ncbi.nlm.nih.gov/pubmed/12925520). All probe sets available for the genes of interest were retrieved as reported below. Fir gene CD274, when several probe sets were available to represent this gene, the probe set with the probe set with the highest average expression value (defined as an arithmetical average of expression of a given probe set) was selected to represent the gene:

### CD274 (PDL1)

[0288] 223834_at selected for PDL1

[0289] 227458_at

[0290] The selected probe set corresponds to the last exon/3′UTR of the gene and captures all known RefSEq mRNAs (see FIG. 6A and FIG. 6B)

### IFNG

[0291] 210354_at

[0292] This probe set also represents the last exon/3′UTR of the gene and captures all known RefSEq mRNAs (see FIG. 7A and FIG. 7B)

[0293] FIG. 8 shows joint distribution of the expression of the above genes in the samples of both ER− and ER− populations. Symbol types correspond to the final pCR status (solid: pCR achieved, open—pCR not achieved).

[0294] More details on distribution of CD274 and IFNG expression across ER and pCR strata can be found in Appendix I.

[0295] For every ER subpopulation, a logistic regression model was constructed that relates expression of the selected genes with clinical response adjusted for patient age, cancer type, and nodal status:

### Response˜Patient.Age+Cancer.Type+pN+CD274+IFNG

### 1. ER− Population.

[0296] Summarized model output is given below. Odds ratios are (OR) provided per unit change of biomarker value. As the expression values are given on log 2 scale, one unit change would correspond to 2-fold overexpression. For details see Appendix.

| | ER− population | |
|---|---|---|
| | | LR test |
| Term | OR (95% CI) | p-value |
| CD274 | 5.2 (1.5; 26.7) | 0.008 |
| IFNG | 0.30 (0.10; 0.74) | 0.007 |
| Patient | | 0.24 |
| Age | | |
| Cancer | | 0.91 |
| Type | | |
| pN | | 0.87 |

[0297] The final model for predicting probability for a particular patient to respond to the treatment includes expression of CD274 and IFNG and looks like:

p(pCR)=−3.737+1.607*CD274−1.069*IFNG

### 2. ER+ Population.

[0298] Summarized model output is given below. Odds ratios are (OR) provided per unit change of biomarker value. As the expression values are given on log 2 scale, one unit change would correspond to 2-fold overexpression. For details see Appendix.

| | ER+ population | |
|---|---|---|
| | | LR test |
| Term | OR (95% CI) | p-value |
| CD274 | | 0.93 |
| IFNG | | 0.23 |
| Patient | | 0.34 |
| Age | | |
| Cancer | | 0.39 |
| Type | | |
| pN | | 0.92 |

[0299] The role of PDL1 expression is evident in ER− subpopulation of HER2+ breast cancer patients that underwent combinational treatment with Trastuzumab and chemotherapy in the neoadjuvant setting. Namely, overexpression of PDL1 at diagnosis corresponds to a lower rate of response to neoadjuvant therapy (i.e. a lower rate of response to combinational treatment with Trastuzumab and chemotherapy). This holds irrespective of patient age, cancer type, or lymph node status. A baseline assessment of gene expression of either of the two biomarkers, PDL1 and INFG, respectively, allows to identify if a patient is likely to experience a greater benefit if a PDL-1 targeted therapy is added to Trastuzumab and chemotherapy.

[0300] The following relates to a cut-off value allowing determining a patient as being in need of a PD-L1 inhibitor cotherapy in accordance with the present invention.

[0301] If a gene expression analysis gives a result for IFNG expression higher or equal to 4.8 no combination treatment (HER2-targeted and PDL1-targeted) is recommended and no further PDL1 assessment would be necessary. If a gene expression analysis gives a result for IFNG lower than 4.8 a parallel assessment of PDL-1 is necessary. If PDL-1 gene expression analysis then gives a result of higher or equal to 5.3 a combination treatment (HER2-targeted and PDL1-targeted) is recommended (see FIG. 19).

APPENDIX I
ER− subpopulation
Oneway Analysis of CD274 Expression By pCR ER = ERneg
(see FIG. 9 A)
t Test
YES-NO
Assuming unequal variances

| | | | |
|---|---|---|---|
| Difference | −0.32948 | t Ratio | −1.94171 |
| Std Err Dif | 0.16969 | DF | 45.11513 |
| Upper CL Dif | 0.01226 | Prob > \|t\| | 0.0584 |
| Lower CL Dif | −0.67122 | Prob > t | 0.9708 |
| Confidence | 0.95 | Prob < t | 0.0292* |

The results are also shown in FIG. 9B.
Oneway Analysis of IFNG Expression By pCR ER = ERneg
The results are shown in FIG. 10A.
t Test
YES-NO
Assuming unequal variances

| | | | |
|---|---|---|---|
| Difference | 0.58405 | t Ratio | 2.044225 |
| Std Err Dif | 0.28571 | DF | 30.21429 |
| Upper CL Dif | 1.16737 | Prob > \|t\| | 0.0497* |
| Lower CL Dif | 0.00073 | Prob > t | 0.0249* |
| Confidence | 0.95 | Prob < t | 0.9751 |

The results are shown in FIG. 10B.
ER+ subpopulation
Oneway Analysis of CD274 Expression By pCR ER = ERpos
The results are shown in FIG. 11A.
t Test
YES-NO
Assuming unequal variances

| | | | |
|---|---|---|---|
| Difference | 0.25169 | t Ratio | 0.898709 |
| Std Err Dif | 0.28006 | DF | 6.542171 |
| Upper CL Dif | 0.92345 | Prob > \|t\| | 0.4007 |
| Lower CL Dif | −0.42006 | Prob > t | 0.2003 |
| Confidence | 0.95 | Prob < t | 0.7997 |

The results are shown in FIG. 11B.
Oneway Analysis of IFNG Expression By pCR ER = ERpos
The results are shown in FIG. 12A.
t Test
YES-NO
Assuming unequal variances

| | | | |
|---|---|---|---|
| Difference | 0.5931 | t Ratio | 1.501336 |
| Std Err Dif | 0.3951 | DF | 7.109044 |
| Upper CL Dif | 1.5244 | Prob > \|t\| | 0.1763 |
| Lower CL Dif | −0.3382 | Prob > t | 0.0882 |
| Confidence | 0.95 | Prob < t | 0.9118 |

The results are shown in FIG. 12B.

APPENDIX II
Nominal Logistic Fit for pCR ER = ERneg
Converged in Gradient, 5 iterations
Whole Model Test

| Model | −LogLikelihood | DF | ChiSquare | Prob > ChiSq |
|---|---|---|---|---|
| Difference | 6.784783 | 6 | 13.56957 | 0.0348* |
| Full | 26.110299 | | | |
| Reduced | 32.895082 | | | |

| | |
|---|---|
| RSquare (U) | 0.2063 |
| AICc | 69.0206 |
| BIC | 79.319 |
| Observations (or Sum Wgts) | 48 |

| Measure | Training | Definition |
|---|---|---|
| Entropy RSquare | 0.2063 | 1 − Loglike(model)/Loglike(0) |
| Generalized RSquare | 0.3301 | (1 − (L(0)/L(model))\hat{ }(2/n))/(1 − L(0)\hat{ }(2/n)) |
| Mean −Log p | 0.5440 | Σ −Log(ρ[j])/n |
| RMSE | 0.4278 | √Σ(y[j] − ρ[j])²/n |
| Mean Abs Dev | 0.3665 | Σ \|y[j] − ρ[j]\|/n |
| Misclassification Rate | 0.2292 | Σ (ρ[j]≠ρMax)/n |
| N | 48 | n |

Lack Of Fit

| Source | DF | −LogLikelihood | ChiSquare |
|---|---|---|---|
| Lack Of Fit | 41 | 26.110299 | 52.2206 |
| Saturated | 47 | 0.000000 | Prob > ChiSq |
| Fitted | 6 | 26.110299 | 0.1125 |

Parameter Estimates

| Term | Estimate | Std Error | ChiSquare | Prob > ChiSq | Lower 95% | Upper 95% |
|---|---|---|---|---|---|---|
| Intercept | −5.9688255 | 4.1632695 | 2.06 | 0.1517 | −15.115329 | 1.70408281 |
| Patient Age | 0.04906238 | 0.0425045 | 1.33 | 0.2484 | −0.0324034 | 0.13829525 |
| Cancer Type[IBC] | −0.0943023 | 1.0982289 | 0.01 | 0.9316 | −2.5407977 | 2.23824618 |
| Cancer | −0.1514945 | 0.6544424 | 0.05 | 0.8169 | −1.5051269 | 1.21757158 |
| Type[LABC] | | | | | | |
| pN[N0] | 0.08157636 | 0.4979574 | 0.03 | 0.8699 | −0.8986622 | 1.09707358 |
| CD274 Expression | 1.64979222 | 0.7194762 | 5.26 | 0.0218* | 0.39533833 | 3.2836052 |
| IFNG Expression | −1.1882978 | 0.5122023 | 5.38 | 0.0203* | −2.3323039 | −0.2889168 |

For log odds of NO/YES
Effect Likelihood Ratio Tests

| Source | Nparm | DF | L-R ChiSquare | Prob > ChiSq |
|---|---|---|---|---|
| Patient Age | 1 | 1 | 1.38574446 | 0.2391 |
| Cancer Type | 2 | 2 | 0.19781033 | 0.9058 |
| pN | 1 | 1 | 0.02690704 | 0.8697 |
| CD274 Expression | 1 | 1 | 7.09800433 | 0.0077* |
| IFNG Expression | 1 | 1 | 7.15387723 | 0.0075* |

Odds Ratios
For pCR odds of NO versus YES
Tests and confidence intervals on odds ratios are likelihood ratio based.
Unit Odds Ratios
Per unit change in regressor

| Term | Odds Ratio | Lower 95% | Upper 95% | Reciprocal |
|---|---|---|---|---|
| Patient Age | 1.050286 | 0.968116 | 1.148315 | 0.9521217 |
| CD274 Expression | 5.205898 | 1.484886 | 26.67176 | 0.1920898 |
| IFNG Expression | 0.30474 | 0.097072 | 0.749074 | 3.2814908 |

Odds Ratios for Cancer Type

| Level1 | /Level2 | Odds Ratio | Prob > Chisq | Lower 95% | Upper 95% |
|---|---|---|---|---|---|
| LABC | IBC | 0.9444125 | 0.9722 | 0.0282989 | 35.902054 |
| OPERABLE | IBC | 1.405087 | 0.8471 | 0.0357479 | 68.159191 |
| OPERABLE | LABC | 1.4877895 | 0.6568 | 0.2518769 | 9.0216463 |
| IBC | LABC | 1.0588593 | 0.9722 | 0.0278536 | 35.337072 |
| IBC | OPERABLE | 0.7116997 | 0.8471 | 0.0146715 | 27.973694 |
| LABC | OPERABLE | 0.6721381 | 0.6568 | 0.1108445 | 3.9701934 |

Odds Ratios for pN

| Level1 | /Level2 | Odds Ratio | Prob > Chisq | Lower 95% | Upper 95% |
|---|---|---|---|---|---|
| N1 | N0 | 0.8494615 | 0.8697 | 0.1114536 | 6.033483 |
| N0 | N1 | 1.1772165 | 0.8697 | 0.1657417 | 8.9723459 |

Receiver Operating Characteristic
(see FIG. 13)
Using pCR = ‘YES’ to be the positive level
AUC
0.79718
Confusion Matrix
Actual
Predicted

| Training | NO | YES |
|---|---|---|
| NO | 22 | 5 |
| YES | 6 | 15 |

Lift Curve
(see FIG. 14)

| | pCR |
|---|---|
| . . . | NO |
| . . . | YES |

Prediction Profiler
(see FIG. 15)
Nominal Logistic Fit for pCR ER = ERpos
Converged in Gradient, 19 iterations
Whole Model Test

| Model | −LogLikelihood | DF | ChiSquare | Prob > ChiSq |
|---|---|---|---|---|
| Difference | 2.400597 | 6 | 4.801193 | 0.5696 |
| Full | 14.343001 | | | |
| Reduced | 16.743598 | | | |

| | |
|---|---|
| RSquare (U) | 0.1434 |
| AICc | 46.2989 |
| BIC | 54.3309 |
| Observations (or Sum Wgts) | 39 |

| | | |
|---|---|---|
| Measure | Training | Definition |
| Entropy RSquare | 0.1434 | 1 − Loglike(model)/Loglike(0) |
| Generalized RSquare | 0.2010 | (1 − (L(0)/L(model))\hat{ }(2/n))/(1 − L(0)\hat{ }(2/n)) |
| Mean −Log p | 0.3678 | Σ −Log(ρ[j])/n |
| RMSE | 0.3462 | √Σ(y[j] − ρ[j])²/n |
| Mean Abs Dev | 0.2351 | Σ \|y[j] − ρ[j]\|/n |
| Misclassification Rate | 0.1795 | Σ (ρ[j]≠Max)/n |
| N | 39 | n |

Lack Of Fit

| Source | DF | −LogLikelihood | ChiSquare |
|---|---|---|---|
| Lack Of Fit | 32 | 14.343001 | 28.686 |
| Saturated | 38 | 0.000000 | Prob > ChiSq |
| Fitted | 6 | 14.343001 | 0.6351 |

Parameter Estimates

| | | | | | | Lower | Upper |
|---|---|---|---|---|---|---|---|
| Term | | Estimate | Std Error | ChiSquare | Prob > ChiSq | 95% | 95% |
| Intercept | Unstable | 7.20306909 | 3597.5107 | 0.00 | 0.9984 | −7043.7884 | 7058.1945 |
| Patient Age | | 0.0578149 | 0.0628112 | 0.85 | 0.3573 | −0.0560483 | 0.19608254 |
| Cancer | Unstable | 12.0092513 | 7195.0139 | 0.00 | 0.9987 | −14089.959 | 14113.9773 |
| Type[IBC] | | | | | | | |
| Cancer | Unstable | −6.5864683 | 3597.507 | 0.00 | 0.9985 | −7057.5706 | 7044.39766 |
| Type[LABC] | | | | | | | |
| pN[N0] | | −0.0542869 | 0.5572904 | 0.01 | 0.9224 | −1.1698378 | 1.117206 |
| CD274 | | 0.08485271 | 0.9859164 | 0.01 | 0.9314 | −1.8704698 | 2.14104768 |
| Expression | | | | | | | |
| IFNG | | −0.7334678 | 0.6191817 | 1.40 | 0.2362 | −2.0476903 | 0.45985303 |
| Expression | | | | | | | |

For log odds of NO/YES
Effect Likelihood Ratio Tests

| Source | Nparm | DF | L-R ChiSquare | Prob > ChiSq |
|---|---|---|---|---|
| Patient Age | 1 | 1 | 0.92588732 | 0.3359 |
| Cancer Type | 2 | 2 | 1.89140212 | 0.3884 |
| pN | 1 | 1 | 0.00946444 | 0.9225 |
| CD274 Expression | 1 | 1 | 0.00742213 | 0.9313 |
| IFNG Expression | 1 | 1 | 1.45693945 | 0.2274 |

Odds Ratios
For pCR odds of NO versus YES
Tests and confidence intervals on odds ratios are likelihood ratio based.
Unit Odds Ratios
Per unit change in regressor

| Term | Odds Ratio | Lower 95% | Upper 95% | Reciprocal |
|---|---|---|---|---|
| Patient Age | 1.059519 | 0.945493 | 1.216627 | 0.9438246 |
| CD274 Expression | 1.088557 | 0.154051 | 8.508347 | 0.9186476 |
| IFNG Expression | 0.480241 | 0.129033 | 1.583841 | 2.0822891 |

Odds Ratios for Cancer Type

| Level1 | /Level2 | Odds Ratio | Prob > Chisq | Lower 95% | Upper 95% |
|---|---|---|---|---|---|
| LABC | IBC | 8.3942e−9 | 0.2128 | 0 | 5.1523961 |
| OPERABLE | IBC | 2.6876e−8 | 0.4499 | 0 | 20.868673 |
| OPERABLE | LABC | 3.2017112 | 0.3193 | 0.2999262 | 36.429388 |
| IBC | LABC | 119129251 | 0.2128 | 0.1940845 | . |
| IBC | OPERABLE | 37207993 | 0.4499 | 0.0479187 | . |
| LABC | OPERABLE | 0.312333 | 0.3193 | 0.0274504 | 3.3341535 |

Odds Ratios for pN

| Level1 | /Level2 | Odds Ratio | Prob > Chisq | Lower 95% | Upper 95% |
|---|---|---|---|---|---|
| N1 | N0 | 1.1146872 | 0.9225 | 0.1070551 | 10.377869 |
| N0 | N1 | 0.8971126 | 0.9225 | 0.0963589 | 9.3409878 |

Receiver Operating Characteristic
(see FIG. 16)
Using pCR = ‘YES’ to be the positive level
AUC
0.77273
Confusion Matrix
Actual
Predicted

| Training | NO | YES |
|---|---|---|
| NO | 32 | 1 |
| YES | 6 | 0 |

[0302] The present invention refers to the following nucleotide and amino acid sequences:

[0303] The sequences provided herein are, inter alia, available in the NCBI database and disclosed in WO 2010/077634 and can be retrieved from world wide web at ncbi.nlm.nih.gov/sites/entrez?db=gene; Theses sequences also relate to annotated and modified sequences. The present invention also provides techniques and methods wherein homologous sequences, and variants of the concise sequences provided herein are used.

[0304] SEQ ID NO:s 1-21 define the anti-PD-L1 antibody to be used in accordance with the present invention. SEQ ID NO:s 1-21 are shown in the sequence listing.

[0305] SEQ ID No. 22 to 37 show sequences of amino acid sequences for Domains I-IV of the HER2 protein (SEQ ID NO. 22-25, see also FIG. 1) and sequences of anti-HER2-antibodies. (SEQ ID No. 26 to 37; see also FIGS. 2-5).

[0306] SEQ ID No. 26:

[0307] Amino acid sequence of the variable light (V_{L}) (FIG. 2A) domain of murine monoclonal antibody 2C4 (SEQ ID Nos. 26 and 27, respectively) as shown in FIG. 2.

[0308] SEQ ID No. 27:

[0309] Amino acid sequence of the variable heavy (V_{H}) (FIG. 2B) domain of murine monoclonal antibody 2C4 as shown in FIG. 2.

[0310] SEQ ID No. 28:

[0311] Amino acid sequence of the variable light (V_{L}) (FIG. 2A) domain of variant 574/Pertuzumab as shown in FIG. 2.

[0312] SEQ ID No. 29:

[0313] Amino acid sequence of the variable heavy (V_{H}) (FIG. 2B) domain of variant 574/Pertuzumab as shown in FIG. 2.

[0314] SEQ ID No. 30:

[0315] human V_{L} consensus frameworks (hum κ1, light kappa subgroup I; humIII, heavy subgroup III) as shown in FIG. 2.

[0316] SEQ ID No. 31:

[0317] human V_{H} consensus frameworks (hum κ1, light kappa subgroup I; humIII, heavy subgroup III) as shown in FIG. 2.

[0318] SEQ ID No. 32:

[0319] Amino acid sequences of Pertuzumab light chain as shown in FIG. 3A.

[0320] SEQ ID No. 33:

[0321] Amino acid sequences of Pertuzumab heavy chain as shown in FIG. 3B.

[0322] SEQ ID No. 34:

[0323] Amino acid sequence of Trastuzumab light chain domain as shown in FIG. 4A. Boundaries of the variable light domain are indicated by arrows.

[0324] SEQ ID No. 35:

[0325] Amino acid sequence of Trastuzumab heavy chain as shown in FIG. 4B. Boundaries of the variable heavy domain are indicated by arrows.

[0326] SEQ ID No. 36:

[0327] Amino acid sequence of variant Pertuzumab light chain sequence (FIG. 5A).

[0328] SEQ ID No. 37:

[0329] Amino acid sequence of variant Pertuzumab heavy chain sequence (FIG. 5B).

[0330] SEQ ID NO. 38

[0331] Nucleotide sequence encoding homo sapiens Progesterone Receptor (PR)

[0332] NCBI Reference Sequence: NC_000011.9

[0333] >gi|224589802:c101000544-100900355 Homo sapiens chromosome 11, GRCh37.p10 Primary Assembly

[0334] SEQ ID No. 39:

[0335] Amino acid sequence of homo sapiens Progesterone Receptor (PR)

[0336] PRGR_HUMAN Length: 933 Dec. 7, 2012 15:10 Type: P Check: 6067

[0337] SEQ ID NO. 40:

[0338] Nucleotide sequence encoding homo sapiens Estrogen Receptor (ER)

[0339] (NM_000125.3)

[0340] SEQ ID NO. 41:

[0341] Nucleotide sequence encoding homo sapiens Estrogen Receptor (ER)

[0342] NCBI Reference Sequence: NC_000006.11

[0343] >gi|224589818:152011631-152424409 Homo sapiens chromosome 6, GRCh37.p10 Primary Assembly

[0344] SEQ ID No. 42:

[0345] Amino acid sequence of homo sapiens Estrogen Receptor (ER)

[0346] >ENST00000206249_6

[0347] SEQ ID No. 43:

[0348] Nucleotide sequence encoding homo sapiens programmed death ligand 1(PD-L1)

[0349] NCBI Reference Sequence: NC_000009.11

[0350] >gi|224589821:5450503-5470567 Homo sapiens chromosome 9, GRCh37.p10 Primary Assembly

[0351] SEQ ID NO. 44

[0352] Nucleotide sequence encoding homo sapiens programmed death ligand 1(PD-L1) (CD274), transcript variant 1, mRNA

[0353] NCBI Reference Sequence: NM_014143.3

[0354] >gi|292658763|ref|NM_014143.3|Homo sapiens CD274 molecule (CD274), transcript variant 1, mRNA

[0355] SEQ ID No.45:

[0356] Amino acid sequence of homo sapiens programmed death ligand 1(PD-L1) (programmed cell death 1 ligand 1 isoform a precursor [Homo sapiens])

[0357] NCBI Reference Sequence: NP_054862.1

[0358] >gi|7661534|ref|NP_054862.1|programmed cell death 1 ligand 1 isoform a precursor [Homo sapiens]

[0359] SEQ ID No. 46:

[0360] Nucleotide sequence encoding homo sapiens programmed death ligand 1(PD-L1) (CD274), transcript variant 2, mRNA

[0361] NCBI Reference Sequence: NM_001267706.1

[0362] >gi|390979638|ref|NM_001267706.1|Homo sapiens CD274 molecule (CD274), transcript variant 2, mRNA

[0363] SEQ ID No. 47:

[0364] Amino acid sequence of homo sapiens programmed death ligand 1(PD-L1) (programmed cell death 1 ligand 1 isoform b precursor [Homo sapiens])

[0365] NCBI Reference Sequence: NP_001254635.1

[0366] >gi|390979639|ref|NP_001254635.1|programmed cell death 1 ligand 1 isoform b precursor [Homo sapiens]

[0367] SEQ ID No. 48:

[0368] Nucleotide sequence encoding homo sapiens programmed death ligand 1(PD-L1) (Homo sapiens CD274 molecule (CD274), transcript variant 3, non-coding RNA)

[0369] NCBI Reference Sequence: NR_052005.1

[0370] >gi|390979640|ref|NR_052005.1|Homo sapiens CD274 molecule (CD274), transcript variant 3, non-coding RNA

[0371] SEQ ID No. 49:

[0372] Nucleotide sequence encoding homo sapiens interferon gamma (Homo sapiens chromosome 12, GRCh37.p10 Primary Assembly)

[0373] NCBI Reference Sequence: NC_000012.11

[0374] >gi|224589803:c68553521-68548550 Homo sapiens chromosome 12, GRCh37.p10 Primary Assembly

[0375] SEQ ID No. 50:

[0376] Nucleotide sequence encoding homo sapiens interferon gamma, mRNA

[0377] NCBI Reference Sequence: NM_000619.2

[0378] >gi|56786137|ref|NM_000619.2|Homo sapiens interferon, gamma (IFNG), mRNA

[0379] SEQ ID No. 51:

[0380] Amino acid sequence of homo sapiens interferon gamma, interferon gamma precursor [Homo sapiens]

[0381] NCBI Reference Sequence: NP_000610.2

[0382] >gi|56786138|ref|NP_000610.2|interferon gamma precursor [Homo sapiens]

[0383] All references cited herein are fully incorporated by reference. Having now fully described the invention, it will be understood by a person skilled in the art that the invention may be practiced within a wide and equivalent range of conditions, parameters and the like, without affecting the spirit or scope of the invention or any embodiment thereof.

The application's sequence listing, which the Patent Office published only in electronic form, follows.

SEQUENCE LISTING (51 sequences)

SEQ ID NO: 1 - protein, 10 aa, Artificial Sequence
  Description of Artificial Sequence: Synthetic HVR-H1 peptide
  MOD_RES (6)..(6): Asp or Gly
  See specification as filed for detailed description of substitutions and preferred embodiments
GFTFSXSWIH

SEQ ID NO: 2 - protein, 18 aa, Artificial Sequence
  Description of Artificial Sequence: Synthetic HVR-H2 peptide
  MOD_RES (4)..(4): Ser or Leu
  MOD_RES (10)..(10): Thr or Ser
  See specification as filed for detailed description of substitutions and preferred embodiments
AWIXPYGGSXYYADSVKG

SEQ ID NO: 3 - protein, 9 aa, Artificial Sequence
  Description of Artificial Sequence: Synthetic HVR-H3 peptide
RHWPGGFDY

SEQ ID NO: 4 - protein, 25 aa, Artificial Sequence [sequence omitted]

SEQ ID NO: 5 - protein, 13 aa, Artificial Sequence
  Description of Artificial Sequence: Synthetic HC-FR2 speptide
WVRQAPGKGLEWV

SEQ ID NO: 6 - protein, 32 aa, Artificial Sequence
  Description of Artificial Sequence: Synthetic HC-FR3 polypeptide
RFTISADTSKNTAYLQMNSLRAEDTAVYYCAR

SEQ ID NO: 7 - protein, 11 aa, Artificial Sequence
  Description of Artificial Sequence: Synthetic HC-FR4 peptide
WGQGTLVTVSA

SEQ ID NO: 8 - protein, 11 aa, Artificial Sequence
  Description of Artificial Sequence: Synthetic HVR-L1 peptide
  MOD_RES (5)..(5): Asp or Val
  MOD_RES (6)..(6): Val or Ile
  MOD_RES (7)..(7): Ser or Asn
  MOD_RES (9)..(9): Ala or Phe
  MOD_RES (10)..(10): Val or Leu
  See specification as filed for detailed description of substitutions and preferred embodiments
RASQXXXTXXA

SEQ ID NO: 9 - protein, 7 aa, Artificial Sequence
  Description of Artificial Sequence: Synthetic HVR-L2 peptide
  MOD_RES (4)..(4): Phe or Thr
  MOD_RES (6)..(6): Tyr or Ala
  See specification as filed for detailed description of substitutions and preferred embodiments
SASXLXS

SEQ ID NO: 10 - protein, 9 aa, Artificial Sequence
  Description of Artificial Sequence: Synthetic HVR-L3 peptide
  MOD_RES (3)..(3): Tyr, Gly, Phe or Ser
  MOD_RES (4)..(4): Leu, Tyr, Phe or Trp
  MOD_RES (5)..(5): Tyr, Asn, Ala, Thr, Gly, Phe or Ile
  MOD_RES (6)..(6): His, Val, Pro, Thr or Ile
  MOD_RES (8)..(8): Ala, Trp, Arg, Pro or Thr
  See specification as filed for detailed description of substitutions and preferred embodiments
QQXXXXPXT

SEQ ID NO: 11 - protein, 23 aa, Artificial Sequence
  Description of Artificial Sequence: Synthetic LC-FR1 peptide
DIQMTQSPSSLSASVGDRVTITC

SEQ ID NO: 12 - protein, 15 aa, Artificial Sequence
  Description of Artificial Sequence: Synthetic LC-FR2 peptide
WYQQKPGKAPKLLIY

SEQ ID NO: 13 - protein, 32 aa, Artificial Sequence
  Description of Artificial Sequence: Synthetic LC-FR3 polypeptide
GVPSRFSGSGSGTDFTLTISSLQPEDFATYYC

SEQ ID NO: 14 - protein, 11 aa, Artificial Sequence
  Description of Artificial Sequence: Synthetic LC-FR4 peptide
FGQGTKVEIKR

SEQ ID NO: 15 - protein, 10 aa, Artificial Sequence
  Description of Artificial Sequence: Synthetic heavy chain peptide
GFTFSDSWIH

SEQ ID NO: 16 - protein, 18 aa, Artificial Sequence
  Description of Artificial Sequence: Synthetic heavy chain peptide
AWISPYGGSTYYADSVKG

SEQ ID NO: 17 - protein, 11 aa, Artificial Sequence
  Description of Artificial Sequence: Synthetic light chain peptide
RASQDVSTAVA

SEQ ID NO: 18 - protein, 7 aa, Artificial Sequence
  Description of Artificial Sequence: Synthetic light chain peptide
SASFLYS

SEQ ID NO: 19 - protein, 9 aa, Artificial Sequence
  Description of Artificial Sequence: Synthetic light chain peptide
QQYLYHPAT

SEQ ID NO: 20 - protein, 118 aa, Artificial Sequence
  Description of Artificial Sequence: Synthetic heavy chain polypeptide
EVQLVESGGGLVQPGGSLRLSCAASGFTFSDSWIHWVRQAPGKGLEWVAWISPYGGSTYYADSVKGRFTISADTSKNTAYLQMNSLRAEDTAVYYCARRHWPGGFDYWGQGTLVTVSA

SEQ ID NO: 21 - protein, 108 aa, Artificial Sequence
  Description of Artificial Sequence: Synthetic light chain polypeptide
DIQMTQSPSSLSASVGDRVTITCRASQDVSTAVAWYQQKPGKAPKLLIYSASFLYSGVPSRFSGSGSGTDFTLTISSLQPEDFATYYCQQYLYHPATFGQGTKVEIKR

SEQ ID NO: 22 - protein, 195 aa, Homo sapiens
TQVCTGTDMKLRLPASPETHLDMLRHLYQGCQVVQGNLELTYLPTNASLSFLQDIQEVQGYVLIAHNQVRQVPLQRLRIVRGTQLFEDNYALAVLDNGDPLNNTTPVTGASPGGLRELQLRSLTEILKGGVLIQRNPQLCYQDTILWKDIFHKNNQLALTLIDTNRSRACHPCSPMCKGSRCWGESSEDCQSLTR

SEQ ID NO: 23 - protein, 124 aa, Homo sapiens
TVCAGGCARCKGPLPTDCCHEQCAAGCTGPKHSDCLACLHFNHSGICELHCPALVTYNTDTFESMPNPEGRYTFGASCVTACPYNYLSTDVGSCTLVCPLHNQEVTAEDGTQRCEKCSKPCARV

SEQ ID NO: 24 - protein, 169 aa, Homo sapiens
CYGLGMEHLREVRAVTSANIQEFAGCKKIFGSLAFLPESFDGDPASNTAPLQPEQLQVFETLEEITGYLYISAWPDSLPDLSVFQNLQVIRGRILHNGAYSLTLQGLGISWLGLRSLRELGSGLALIHHNTHLCFVHTVPWDQLFRNPHQALLHTANRPEDECVGEGLA

SEQ ID NO: 25 - protein, 142 aa, Homo sapiens
CHQLCARGHCWGPGPTQCVNCSQFLRGQECVEECRVLQGLPREYVNARHCLPCHPECQPQNGSVTCFGPEADQCVACAHYKDPPFCVARCPSGVKPDLSYMPIWKFPDEEGACQPCPINCTHSCVDLDDKGCPAEQRASPLT

SEQ ID NO: 26 - protein, 107 aa, Mus musculus
DTVMTQSHKIMSTSVGDRVSITCKASQDVSIGVAWYQQRPGQSPKLLIYSASYRYTGVPDRFTGSGSGTDFTFTISSVQAEDLAVYYCQQYYIYPYTFGGGTKLEIK

SEQ ID NO: 27 - protein, 119 aa, Mus musculus
EVQLQQSGPELVKPGTSVKISCKASGFTFTDYTMDWVKQSHGKSLEWIGDVNPNSGGSIYNQRFKGKASLTVDRSSRIVYMELRSLTFEDTAVYYCARNLGPSFYFDYWGQGTTLTVSS

SEQ ID NO: 28 - protein, 107 aa, Artificial Sequence [sequence omitted]

SEQ ID NO: 29 - protein, 119 aa, Artificial Sequence [sequence omitted]

SEQ ID NO: 30 - protein, 107 aa, Artificial Sequence
  Description of Artificial Sequence: Synthetic consensus framework Hum kappa1 Variable Light Chain
DIQMTQSPSSLSASVGDRVTITCRASQSISNYLAWYQQKPGKAPKLLIYAASSLESGVPSRFSGSGSGTDFTLTISSLQPEDFATYYCQQYNSLPWTFGQGTKVEIK

SEQ ID NO: 31 - protein, 119 aa, Artificial Sequence
  Description of Artificial Sequence: Synthetic consensus framework Hum kappa1 Variable Heavy Chain
EVQLVESGGGLVQPGGSLRLSCAASGFTFSSYAMSWVRQAPGKGLEWVAVISGDGGSTYYADSVKGRFTISRDNSKNTLYLQMNSLRAEDTAVYYCARGRVGYSLYDYWGQGTLVTVSS

SEQ ID NO: 32 - protein, 214 aa, Artificial Sequence
  Description of Artificial Sequence: Synthetic Pertuzumab light chain
DIQMTQSPSSLSASVGDRVTITCKASQDVSIGVAWYQQKPGKAPKLLIYSASYRYTGVPSRFSGSGSGTDFTLTISSLQPEDFATYYCQQYYIYPYTFGQGTKVEIKRTVAAPSVFIFPPSDEQLKSGTASVVCLLNNFYPREAKVQWKVDNALQSGNSQESVTEQDSKDSTYSLSSTLTLSKADYEKHKVYACEVTHQGLSSPVTKSFNRGEC

SEQ ID NO: 33 - protein, 448 aa, Artificial Sequence
  Description of Artificial Sequence: Synthetic Pertuzumab heavy chain
EVQLVESGGGLVQPGGSLRLSCAASGFTFTDYTMDWVRQAPGKGLEWVADVNPNSGGSIYNQRFKGRFTLSVDRSKNTLYLQMNSLRAEDTAVYYCARNLGPSFYFDYWGQGTLVTVSSASTKGPSVFPLAPSSKSTSGGTAALGCLVKDYFPEPVTVSWNSGALTSGVHTFPAVLQSSGLYSLSSVVTVPSSSLGTQTYICNVNHKPSNTKVDKKVEPKSCDKTHTCPPCPAPELLGGPSVFLFPPKPKDTLMISRTPEVTCVVVDVSHEDPEVKFNWYVDGVEVHNAKTKPREEQYNSTYRVVSVLTVLHQDWLNGKEYKCKVSNKALPAPIEKTISKAKGQPREPQVYTLPPSREEMTKNQVSLTCLVKGFYPSDIAVEWESNGQPENNYKTTPPVLDSDGSFFLYSKLTVDKSRWQQGNVFSCSVMHEALHNHYTQKSLSLSPG

SEQ ID NO: 34 - protein, 214 aa, Artificial Sequence
  Description of Artificial Sequence: Synthetic Trastuzumab light chain
DIQMTQSPSSLSASVGDRVTITCRASQDVNTAVAWYQQKPGKAPKLLIYSASFLYSGVPSRFSGSRSGTDFTLTISSLQPEDFATYYCQQHYTTPPTFGQGTKVEIKRTVAAPSVFIFPPSDEQLKSGTASVVCLLNNFYPREAKVQWKVDNALQSGNSQESVTEQDSKDSTYSLSSTLTLSKADYEKHKVYACEVTHQGLSSPVTKSFNRGEC

SEQ ID NO: 35 - protein, 449 aa, Artificial Sequence
  Description of Artificial Sequence: Synthetic Trastuzumab heavy chain
EVQLVESGGGLVQPGGSLRLSCAASGFNIKDTYIHWVRQAPGKGLEWVARIYPTNGYTRYADSVKGRFTISADTSKNTAYLQMNSLRAEDTAVYYCSRWGGDGFYAMDYWGQGTLVTVSSASTKGPSVFPLAPSSKSTSGGTAALGCLVKDYFPEPVTVSWNSGALTSGVHTFPAVLQSSGLYSLSSVVTVPSSSLGTQTYICNVNHKPSNTKVDKKVEPKSCDKTHTCPPCPAPELLGGPSVFLFPPKPKDTLMISRTPEVTCVVVDVSHEDPEVKFNWYVDGVEVHNAKTKPREEQYNSTYRVVSVLTVLHQDWLNGKEYKCKVSNKALPAPIEKTISKAKGQPREPQVYTLPPSREEMTKNQVSLTCLVKGFYPSDIAVEWESNGQPENNYKTTPPVLDSDGSFFLYSKLTVDKSRWQQGNVFSCSVMHEALHNHYTQKSLSLSPG

SEQ ID NO: 36 - protein, 217 aa, Artificial Sequence
  Description of Artificial Sequence: Synthetic variant Pertuzumab light chain sequence
VHSDIQMTQSPSSLSASVGDRVTITCKASQDVSIGVAWYQQKPGKAPKLLIYSASYRYTGVPSRFSGSGSGTDFTLTISSLQPEDFATYYCQQYYIYPYTFGQGTKVEIKRTVAAPSVFIFPPSDEQLKSGTASVVCLLNNFYPREAKVQWKVDNALQSGNSQESVTEQDSKDSTYSLSSTLTLSKADYEKHKVYACEVTHQGLSSPVTKSFNRGEC

SEQ ID NO: 37 - protein, 449 aa, Artificial Sequence
  Description of Artificial Sequence: Synthetic variant Pertuzumab heavy chain sequence
EVQLVESGGGLVQPGGSLRLSCAASGFTFTDYTMDWVRQAPGKGLEWVADVNPNSGGSIYNQRFKGRFTLSVDRSKNTLYLQMNSLRAEDTAVYYCARNLGPSFYFDYWGQGTLVTVSSASTKGPSVFPLAPSSKSTSGGTAALGCLVKDYFPEPVTVSWNSGALTSGVHTFPAVLQSSGLYSLSSVVTVPSSSLGTQTYICNVNHKPSNTKVDKKVEPKSCDKTHTCPPCPAPELLGGPSVFLFPPKPKDTLMISRTPEVTCVVVDVSHEDPEVKFNWYVDGVEVHNAKTKPREEQYNSTYRVVSVLTVLHQDWLNGKEYKCKVSNKALPAPIEKTISKAKGQPREPQVYTLPPSREEMTKNQVSLTCLVKGFYPSDIAVEWESNGQPENNYKTTPPVLDSDGSFFLYSKLTVDKSRWQQGNVFSCSVMHEALHNHYTQKSLSLSPGK

SEQ ID NO: 38 - DNA, 100190 bp, Homo sapiens
agtccacagctgtcactaatcggggtaagccttgttgtatttgtgcgtgtgggtggcattctcaatgagaactagcttcacttgtcatttgagtgaaatctacaacccgaggcggctagtgctcccgcactactgggatctgagatcttcggagatgactgtcgcccgcagtacggagccagcagaagtccgacccttcctgggaatgggctgtaccgagaggtccgactagccccagggttttagtgagggggcagtggaactcagcgagggactgagagcttcacagcatgcacgagtttgatgccagagaaaaagtcgggagataaaggagccgcgtgtcactaaattgccgtcgcagccgcagccactcaagtgccggacttgtgagtactctgcgtctccagtcctcggacagaagttggagaactctcttggagaactccccgagttaggagacgagatctcctaacaattactactttttcttgcgctccccacttgccgctcgctgggacaaacgacagccacagttcccctgacgacaggatggaggccaagggcaggagctgaccagcgccgccctcccccgcccccgacccaggaggtggagatccctccggtccagccacattcaacacccactttctcctccctctgcccctatattcccgaaaccccctcctccttcccttttccctcctcctggagacgggggaggagaaaaggggagtccagtcgtcatgactgagctgaaggcaaagggtccccgggctccccacgtggcgggcggcccgccctcccccgaggtcggatccccactgctgtgtcgcccagccgcaggtccgttcccggggagccagacctcggacaccttgcctgaagtttcggccatacctatctccctggacgggctactcttccctcggccctgccagggacaggacccctccgacgaaaagacgcaggaccagcagtcgctgtcggacgtggagggcgcatattccagagctgaagctacaaggggtgctggaggcagcagttctagtcccccagaaaaggacagcggactgctggacagtgtcttggacactctgttggcgccctcaggtcccgggcagagccaacccagccctcccgcctgcgaggtcaccagctcttggtgcctgtttggccccgaacttcccgaagatccaccggctgcccccgccacccagcgggtgttgtccccgctcatgagccggtccgggtgcaaggttggagacagctccgggacggcagctgcccataaagtgctgccccggggcctgtcaccagcccggcagctgctgctcccggcctctgagagccctcactggtccggggccccagtgaagccgtctccgcaggccgctgcggtggaggttgaggaggaggatggctctgagtccgaggagtctgcgggtccgcttctgaagggcaaacctcgggctctgggtggcgcggcggctggaggaggagccgcggctgtcccgccgggggcggcagcaggaggcgtcgccctggtccccaaggaagattcccgcttctcagcgcccagggtcgccctggtggagcaggacgcgccgatggcgcccgggcgctccccgctggccaccacggtgatggatttcatccacgtgcctatcctgcctctcaatcacgccttattggcagcccgcactcggcagctgctggaagacgaaagttacgacggcggggccggggctgccagcgcctttgccccgccgcggagttcaccctgtgcctcgtccaccccggtcgctgtaggcgacttccccgactgcgcgtacccgcccgacgccgagcccaaggacgacgcgtaccctctctatagcgacttccagccgcccgctctaaagataaaggaggaggaggaaggcgcggaggcctccgcgcgctccccgcgttcctaccttgtggccggtgccaaccccgcagccttcccggatttcccgttggggccaccgcccccgctgccgccgcgagcgaccccatccagacccggggaagcggcggtgacggccgcacccgccagtgcctcagtctcgtctgcgtcctcctcggggtcgaccctggagtgcatcctgtacaaagcggagggcgcgccgccccagcagggcccgttcgcgccgccgccctgcaaggcgccgggcgcgagcggctgcctgctcccgcgggacggcctgccctccacctccgcctctgccgccgccgccggggcggcccccgcgctctaccctgcactcggcctcaacgggctcccgcagctcggctaccaggccgccgtgctcaaggagggcctgccgcaggtctacccgccctatctcaactacctgaggtgagggcccgggacggggcacgcccagcgcgtccgggagtagcggttccgttggcggcggcggccgccaaccctcagccccagccccagcgcaccgctgcgctccccggggcggccggagagggtgggcagcgggacacagcacaggggcagttgcctcccttcttcttccctcctctcctcactcttggggacacgaaggtgggcgcagaatatactatttttggggcgtgcctccctgaaagctgtttttttgtttgttttttaactttccgaatcttccagattccgaagcagaaccaaccccgatttaaaacgtgcagcgtcacactaggtccgctgtagcccagtggggcagaaagtgcgcggcgagttgggggctttatgaaatgcttctttcttagaagaaggacgtttaccaggagtgcttgtcttggagaggagttaaggcaccgttcccccgggaggggtgggacttgagaggtggccggccagaaccgaaagcagcaccatcttagggatttgaacacttcagtggctcagttttcttaagaatctcaagattaaaattaagttcacgtgggaaatgtttaaactgtggatttaaacgcctgtcactgcattgcaccgttttcttattattgcttgctattcactacaattttttttatatacaggtttaaaaaacactactttgcatactgaagtaatggaatgtaaaaaaagaatgctctgtttggaatcttatgttgtgaataggcaaaacagtgtcagtgtattggacaatactttaaaatgacaaacatatacttgcttaagtaagcaatgattacagggttgtgttttaaaaactcaaaaccaaaacattgcaaagtaccatcgaacttttaaagccaaaccatatttgttttgacccagcatacagacaggaaggacataacatttcatttgtcaaagactaaattgtttctatataaagagttttgtagaaagatttccttttaaccgactttaactttctaggacataatattatacactaattattgttcttttatattggtgctactgatgaatggctaatcatttgcaagtatggtgaatccagttacggatagtctattaccaagtttagtttgcatgtctttcaagtgtatatatacagttctgtttttaaaatctcctttcaccctgttaatactggtttaagaaacctttagtattagatagtggtgcacttaaaaataaatggagtactttgttttgcatttcaaggccggattcagaagccagccagagcccacaatacagcttcgagtcattacctcagaagatttgtttaatctgtggggatgaagcatcaggctgtcattatggtgtccttacctgtgggagctgtaaggtcttctttaagagggcaatggaaggtaggctcctttcccctgatcctttattattggtttaattgtaaatggagaccatctaatattgtatagatttcaattattccttgtttcttataagaaatggtgatatttccatataatttaaaatatatgatgacattttaacaatatgtttttatttatgatactcaaaatggaatgtggttgggtactataattgcatactctttgactaacactttcagtattagacataagtcataaaaatcttgaggacagtgctactattgttccttaactgcttagctttgaggaaacagctttgttctaatagtacttttatatatctattatgtaggtatatgtgtatgcagtactttaaaattttgattaaaagaaaaatggtagttgacacatatgtacatgtatgcgtatacatatttgtacatacacgaacatatatcacaacatgtatatgatgcagttttctacatgatactgtcttttgactacatgaatatttatgtaatatttacaaagaagtaattctaaacaaatttttgaattctctttttgttcagtatatttttgtaagtgtataagaggacaggattaaacagtttaaaataaaaaacctggacatcacagtaacataatttctaaagaagtattttgctttaagtaaaactttcatgtttttaaactcattgaacttacatgcttaatgatttcagatttacttgcatagtgtttcagattttaactttcaaagaaaatatttttgaatttctttctacctaaagtctaagcagccaaacatctttacatttgaagataaaaatacattgaaagatttcatattttaataccagcaataaatgtattctataactatgtaaaatgaagcttaggattccctctggagtgctgagatcacacctagacaaggaaccaaggatctgaatgttggctttttgtttcctgttctgaggatttttgtttgtttgtttgtttcaacagccctctccttacaagcagaaaagcaggtagtaggaaatttcactttaagggagctttcaaaggagttcttcataacaaatatttgctttgtatatttttagaacatgattttttctcacaaaagatgaatgtattttactgatgttgaacatattcagctttagggggtttgattgcattttaaactaattgaggcagtgttaaaagtggtacttgagaaaatagggcaactgatagtggctcttacccattgacattatttatttacagttacagttggaagttctttgtgtggaaaagtcagttttccaatgggtaattggagttaccatttttatctgactttggttctggtttcttaaacattgccttctgcattaatatgatttcctctcttcttaaagtctcctaaggatagtataattttataagtgaatgactcccttagaatcctcttaagcccaatttgtcctaccccagctccttcttttgaaagataagcaaatctcaaagacataaatatgagtttccaaaggtcacaaaactagttagtagctgattgttagtaaacataggttaaatatttttacattgcagcgcttgtaaatcagagatgatatgcaaaagtagatatataaactgtttgattcacagaagttatttcataaagtgcatatatagaacaaagagcaccctaactaaaatacaaatgctttctcgtcattttgttagaatagcatccaaaactgtagacgaagtctttccaaatgtactcttagaaagcatttgttggactccggctgttggcatggtcctatagtcttgagtactagaagtgaagcacctttatttagcagtaattacaaagagttacttaagattgatgcagataaatcattcatgaaactagaacaagattatgaactacattagtaagttccttcattcagcaatttatgccaaagatacactttccctgacttcacttttctctgccttgagataaaatgaggataacagtggctatttcttagggttgctataaagattaaatgagctgatacttgtaaagtatgtaaaagaaggcctgacatattatcagtttccattgacatttctactttcaaggaacttgtaatatagttagggaggtaacatatgcacataaaacatctaaataaagattctcagtaaatgcccaagtaagcaattctgtaatgtatatgagatctgtgtggtttgtgagtttttgtatttggacagagcgaggtggttatgggttgaaatatgtatattcttgaatgatgaagaagtctacatggaagatatgaacatttgattagtaaaggacaaataagctttctaggcattgaggagagctttaagtgtatacagtcaaagaagagtgaagaaattaagattacactgactaagcattgaatgttcacattaggaaattgagagagttaaagtttgagaaactagattgctagtgtttgggtgaatttggagaatcggtaatttaaggcaagagaatatagagaatgttctaggagttttcaggaatgagaaagataagtagaaggacttatatcaggttcaaaatcttcaataaagcaatgctgcgtgatgagctggttcaaggtggcgctgtgtgtggatgccaatatggccagaagtttaaagtaaacaggcaacaatatggatactaatgttgccaaggatgagaatgaaaatgatggcattataaaatgctttctctgtgccagtgactatttcagtgctttgcaggtcttaacttatttagttgttataatgttggtattattattattactcccactttacaaatgaggaaactaagacctgtagatgttaagctgtcttaatacgcttaggaaatggtaaagtcaggattcaaatccaggtggtatgaatccagaatcccggcccttgaccactgtgcttcctttctcataataggaaatgcagtcaaagaaaaacaatagagggttagaagaaaagatgtgagccaagtgatgaaacatctaggaaggtaaaagtgaatcctaaaggagaatgcaagagcaggggtaatgagaagtgtgtgatataaaaggatggatcatattaacttcacatttagggcagcaataagaagacataagcaggagccaacagccagtttcttcacctccctcccatgttaggagagggaggtgataaagcctataaagtcattctggatgactgggtttccctggatatgagacagaagagagaagagataaagaaataagataccactcaggaaatgggagaaaggagttgggaaaaatgatttcttttaagctaattgaactgtttaggatatagtattggccaaaaaccagttggttggatagcccattgcattcctttaccaagacttgtaggtttggagtgaaccatgaaaggaccaggaattgacttaatgccttccaaagagaggaagtaatcatgacctgccagtcctacaaatgcagactactaacctggtatgatgaaggaaaggactatttctcaatggcttatctttgccagtacacagtaaccagcccagtgctaggaatatactaggcatccagtagataactgctacatgatccagtcatcataactgataacgccacacttttattttttggatgctttactcagtgacagcatttgttgtgaatacatttggtgtaatatcattaaacacatgttataatacaattgaaatgtattacttagaagacactaagctaagtaggtattgaaggattttcaattgtattgcatattatgctcacttttttttttttttttttgagacggagtctcgctgttgcccatgctggagtgcagtggtgtgatctcggctcactgcaagctccgcctcccgggttcatgccattctcctgccttagcctcccgagtagctgggactacgggtgccccccaccacgcctggctaattttttgtattttttagtagagatggggtttcaccatggtctcaatctcctaacctcatgatccgcctgcctcggcctcccaaagtgctgggattacaggcgtgagccaccacacctggcctgtcctcattcttttattcatatattaattgttcatgaagtaattaccttaattacattagttcatgtatttattgagtacctgccatgcgccaggcactatgttaggtactggtgaaaccacagtaaaacgagagaccttgctggctgttgactaaagtttatagtgtggtggtggagagagacattttacctatttgtgtacacatgactaattgcacatgtggtaagtgattcgtttatgcaatgtttggacaactagagaattgacccctctgtcagataatggggaaagtttttcagacctagacatcacaataaatagactgcagaggaaactagacagaaatgaaatacttttatgaataaagtgtttctttcaaaagttgggtatacttggtgtcataggctagtaatgaaaactggtttggtagcatagttctccttgatacagcatcagaaagagaaagattgaacatccaatttttcatcagcaacttctgtgatttatttgttctatatttagagctctgtaatgctttctccatcttttgtagtgcacagatcatccagcaatctcttctactataatctatttgaatttgaataatatttgggctctgagaagatattttgccaataatcttatttatattcatttaatctccaatagagtctgctctatagcagctttcacattaccctaaaaataaatatgtagtaattcactagattttatttcaaaactctatatccaatttcttttcaagctgaggtctctcagtttactatttagcatggataatgatagactggttttaagcaccactttacattagggttcattgaaatctctactgtactgaaaaagaaatggttaaaaagatagcatttggtgtcatctgttcatatttggttatttagagctcccagatttttaatactctttcagaacatgtactttaataccactacaagagccagaggagaagcagtggtattagccatgcgtgctagtgctaataactgctcctgttctggccactgaatcattgtactttaattactcaagtaacacaaaaatccatctcctttaaaaaatgaaaatgttatcaataaggcttaagtcctcttgatcaatacctctaatctgttcccttgcctaccatctttctatacctctacctcagtttttcccatgtgtatgtgtgtgtggaatatgttctctggggtatgttaatatataaatggtattatatatcataatttatgcatcatgttattttgatacaaaaatgacttgaagctctattgttcatatatgtagttccaacttgtttttttaaccactgcttaatatttcataatatgaaaaatcattatatttaggaattactaattacactattacttgagtaaaccctttttgtacatttctcctttggtacatgtcttgcttctctttccagaatatattgaagtattttgatacagttctaaatgaactagatgattagctttctacctgctgctaagatgatttgattcactaatttattcacttcagatacatgtattgatcctacatttaaaagttgcttgtgctgggactgaagatgaaaatgtatgcagaccctgtctttgacatgcacaaaaccaagaagaagaaaacaaaacagaacaaacctgtggtacaactagtgaacatgagaataccttgatacaagttatgccagagccgtggccaacacaccgtagtattcagttagacacatggagaagaatggcagtttattctgctaacatatcttgatgttgtgcaagaggcttattcatttaatagtcacttaagtcgccttcactataacccaggcactgttttaactgcttcactggattagctcaattaatccttgtaagagtcctttgaggtggaggttctgttagtatctatattttacagatgggtgtaaagagaggtttctactattcaggaggtctgactctaacttctgtatcttaaattcctgcttctgtgctgttttcctagactgttttgtatttgagcaaatattaattactttatactttttcagataaatacatggtctcttataggagactggttttcaaattgtgctccttaactcagtcaagttccttcttctattcagaacagctctgtatttctttatttggtttatatttccacttgagatttttattgggacaaaggattctcagccaacctttttttaaaaagcactcctttataacaggaaacccttagatctcaatcaagtatttattcgagtgactcctaagaagttttttggctctatttgctggtatctttttggcatttgtgcaaagacgagatgaccatttgtgatcaagatttaaagtccaactgctcactcttctaacagcatggccacattattagccgaaaatcacatctgagttatagagcttttgcttttgtcagaaaaaaaacaaagtaactccagggaatcttttatcagtcacttctttaaaggattgattgaaataattgacacttaagacagacactcaaaaataggcacactaatcatttacacaagggatttccaacccctaggatgtggactggtaccacagccagtccatggtccggtgcgggcccatggcctgttaggaagtgggccacaaagcaggaggtgagcagtggccaagcgagaattacagactgagctccgcctccctgtcacatcagcagcagccttagattctcataagagtgagaaccctattgtgaattctgcatgcaagggatctaggttgcgcacttcttatgagaatctaatacctgatgatctgtggtagaacaatttcatccagaaaccatcccacaccatccatggaaaaattgtattccacaaaactggtccctgataccaaaaaggttgaggactgctggtttacatcttggtttttaaactccattgtcatttaagaacatcagaaagtcacatactctgtatatcttccctatctacctaatttgaggagaggccgatgaacacaatatccttcttgtggctagatggccctcatataattaactatataatgcatacttcatataatctatcatcaagacatttttttctcctctgatgagatattatgctttttaataagtgatatgtaaatagcctattgggttttcctttttattttaactcctgcaaaacaagtacattttaatgctcaattttaaaaaattaacaggttttgagctttatttttaactgctactacagcgtcttgtgttgtgtactttatatgacattttaaggaatcataacttttttcttaaagcatagtatttactagtaatcattatttctttaggaaaaaaatgcaaatacttttcatgctatttactcttctataaccaagtgatttatttatgagatagaatacacatgtagtgagtatggaccgtgagctcaaaacagtgctgtagcatttgtacgaaatataaaaattaaagggtaaaaataatggttatcatttattgagtgtttactaaattcaggtactcttctaatgtctctttgtttactaactcatttaactcttgcaacaaacctatgagacaggttctatttttctcattttacagataagatttgttcagttagtcaacagtagagcagaactccactcctggagtcaatgcccttaacttccactggatattcctttgcaggaaaagatacagtctttgatttcaaggagcctgcagtgtgtgtgtggaagtgagtgattaacagacaacactgcaaatttagtgtttgattaaattgtgtgttgcagacttagggtgctataagtgaactagagaggaaagtaccaagagttgtcattactgattgcctatatataatagaaaccatgctaaatgctttatatttaatatttctattcttcacaacaatcctaaaaagtagaatttaccatttccacttcatatgtaagcaaagactcagaagttagttaacttaccccaattaatagtagtactggcagagatgtgtctgcagtagttagaaaaggtagtttattgagctagtaagatttattcaaagcctttaaaaacagagacagtaattaagaaacgtttatttttgatagtttttttaatataataatattgtgactcctggcgtattatacacaagaaaaatttcaggtgggtcaacaacttaattttttttttatttgaagaaaagaaacctaaaagtatggaaagatgatggaggtatgtatttatagtcttgggatggaaaactttctaaatttgatataaaatccagaattcaaaaacaaatttgctccatttgctatgtaatctcaaatttcttatataaggcaaaaaattcataaagtcaaagacaacaacaaattaggaaactgtaacatatatgtaaatcaaaaggaaattattacccatatacaaaatattcttacaaatcaagaaaaagacaaacaggaagaaaaatgaacaaaaaatattaagacagttcacaaagtacagcccacagaagtatgaagaaggctcaactcactaataagcattactgattaaaataataatgggaatttcagcaatttgagtactggaataataatgaataacaaataatgaccattggagaatctgaagatagtttggtattgtcaattaaaatatgcgttactttggcccaacaattctacttctagaaactcatccttacagaactctagaatacctgtaggtggatgtttattgcagtattacattatttataatactgagaaactgaatacagcccaaatgtctgttaaaaagagattagcaaattgtggtatacccttgcaatgaaaagagtgagttagctgtctatactacagatgtcaagaagtctctaaaatatttgattttatgaaaaagcaaggaacaatatcattctgggtaaaaaattgtacccatttgatcttgctaggtatagagagctatctaaaagaaaataactaagtgcttactgtcaggatgagagacttccaatttctgatgacatgttttggtctttttttttttttttttttttttgaggtggaatctagctctgtcacccagcctggagtgcagtggtttgacctcagctcactgcaacctgtgcctccctggttcaagtgattctcctgcctcagcctcccgaatagctgggattacaggtgcccaccaccatgcccagctaatttttttatttttagtagagacagggtttcaccgtgttgaccagattggtctcgaactcctgacctcaggtgatcctcccgccttggcctcccaaagtgttgggattacaggcatgagccactgcacccagcttcattctttaagcaagtatttactgaaggggctgcaattacacaccaacttggtgcctgactttcctccacactggccccgcctagtctcagctagcctctgctgccctaatggtgtccagtgaccatatgtgccacttttcaccttcaggtaccctagaatgttgaaagagactaacaaagaatgaaacttgaagaatattgaagcaaaagcttgaggttactctgtatcatgaattaaggaatccttcctgactagatggagccaagaatggacacaggcccacaattcctcacacacaatctcaatattcaaaaagcactgcaaacaaaaattttgttgtagtcacttgtcaacaatacctaacctgacgtgaatttgtttggcagcaaaatctgatctgaaatcacatgaggaaatcttgtagtctatgtaaatattcgtacattttgctgcataaatataatgttttattaagtgttgctctattttatctttctaaaatacaaacaattttgaattttgaaacacaattggcccaatacatttcagctaagagattttggacatgtactcagaaatgatttatagactatgttgagagtggtgcctgctggctttttgcaatgtagcagccctgaaaatttttataaacaattcttatcatttattcttatcttttttttttgagagggagtccccgctctgtagcccaggctgaagtgcagtggcacaatctcagctcactgcactctgcctcctgggttcaagcgattctcctgcctcagcctcccgagtagctgggattacaggcatgtaccaccacacacactaatttttgtagttttagtagagatggggtttcaccatgttggccaggttgctcttgaactcctgacctgaagtgatcctcccaccttggcatcccaaagtgctgggattacaggcgtgagcaacagcgcccagcctattcttatcatttttaataaattcttagtaccatgctgggttctacagggagctataaaagataaataagccatattacctaacttcatatagttttcgttcaatcatggagtttatcccatattcaagtataatataggtaatatataaatcaaatgtgtttttgatttcaaggggaaaaagatcatatttagctagggagaccaaaatgtgtttttatggaaaggatagcatgctagatgggctgctgagaatgcatgaaatttttgatagcaagaattgtaatggcttttgtaaacaaaaactacagactgagcagaaggacaatttggctaaagcatggaacatggtcagaatcccttacgattatatataaattatttgtgttttttctaggataattcttttcatgaggttttgaaagagatcagtgaccccttattcccacccccaaaaaagttagcttaccactgctttaaaggaatggtgaggattattataaaacagaaggtcaagaaaatgtggaatgcacaatggggtgtttacaattaattgagtaaagagtgagaagcccctaaatattttttgggcagtgtagtggcatattttaatatttaagaaaattagtatatcagcagtatattggaaagattaatgtcagaaaggtaagggacaaggaaaacagtctggggatggtgcactaaggacctgagccagggttgtggagagaggaatgggttcaatgggtagattggaaccaattgagaagggtgatgaaagcgacacagagaattgtgggggtgggggacgtcaccttcagaaataggaagtacatgatcattttactcagtaaaggagtgatgttgaaagtagtatttaggaaggattatcctaaaagcaccatgcagaatatatttgtacagagattagatagcttgaagtcagagagaacagctaggaaactggtaacacagattctgagaagtagtttaatttcaaattgtttgtattatattctacataatgtcctcagcaggatattgaaataatataatttttgtgcacaaaataacttatgagaattgagatgttctggtttgtcacttcatttagtcgtctgcttatttattaatttataccaaaaataatgccgttttgtgcctggatttgtgttaaatattgagactcaaaaatggatgagccaagttcataacttaggagaaaggcacataaacacgttgcagaaatgcagtctggtaatatctatgagaggtgtgagctgagaattgtggaagtataggacaggaagatctaaccctggtgtttaaatgcggggtatggaaggagaaagtctgaatcctgactaagtattagactaaaaatattaaatcttaaaaattattgtaatttcaaagtttgtggcaacttttttgtaattaacagtggagaccacaatggtttatcttctttaagcagagcacttcagtgagtgtttctttgtgcaaaggcccatccagaggccactttggatgggggggcggatgaaagtatgaagaactgaacctctctatgtactattttaatagaaattagggaattgtaggctagcagctggggcaaggagtaggaaatagaaagggcctaacaactgagtaggaagcaagggctcaaggagagtagatgcctgtgagaatttccctattgcaggcaacaatccataaatccctaggctggtagtgcctgatagcaaacttggaattgtttactatctcatgttttaattacctccagctacctcccaacccttaagtaaatttttgctgtttacattttcctttataaaaggatatgcatttcagattgctgacctttcctatgatgacaagtgtctcagtagtatgatacttagaagatatataggccgggtgcaatggctcacgcctgtaatcccagcactctggaaggccgaggtgggcagatcacgaggtcaggagatcgtgaccatcctggctaacacggtgaaagaaaccccgtctctactaaaaatacaaaaaaaaaaaatagccaggcatggtggtgggtgcctgtagtcccagctactcaggaggctgaggcaggagaatggcatgaacctaggaggtggagcttacagtgagtggagatcacaccactgcactccagcctgggtgacagagcaagactctgggaaaaaaaaaaagaagatatttagcagaaggtacagttaatctgccccttcaagttaaagataatgttcatgatagaaaaaaggaggtaacttctgtttgaaagacactgttgttttgtagatagcattttgaaaacaagtctttggggatgattccactgttatttgattttgttgtgaaggtattataagagatcaaaattttatagtttcatacataaacattttgaaataagattttctaacttgctaaaaaatcttccaaaaaaattcagttaggttctgaacacatttcataatagtggcatttattgaacacatatgtcaggaacttggctaaatgtgttatattaaacacaaagattttaaatcacttgcacagataaatagtaaataaaatggtagagctgagattggaacccacagaaccttctctcttatttgttaatattacctcttattcattatctagtgtctctttgtcctaagtatttgtaatgaaaattgattgacatcagggagagtagatacttgctagctgaatttctggggtaaaagaagcttttcataactggtatgtggaattgaaagtgaatattatgactagataatctgccctgcagacagtcccctcattctccatggcttctgggatggctgtcttccaccttctcttctcagcctgccagcactcccctgtcctcactttcagctaacagccttgcttcctaattttcggaaaaaaactttctgaaattgctaccaccatctgtatggacagaagtggcctctgaactataatcccatttttctggggttaccagagctctgcagttctcaagtccagccctctctccttgaccactagatccagattactcctgctgactcaaggacaggctctaccaatcctcccgcaacatttaaatcatttttccccttctctactggataattcctgtcagcctacaacatgctcttccttttctcatcttaaaatataaacaaactacttttgttgatttcacttactcttcagccaccaatcatttttcttcttttacagcaaaactcttctaacacattttcttctcccattcactcttaaacctaacccaatcagttgttgacctctgtcactccaccaaaacttctcttgtcaaggttaccatgttactaaatcttatgggcaattgtcagtcccatgttacttgactcattggtagcatttgacaattgatcactccaccttcctgcaaatactttattcgcttggttttcaagacacgaccctctcttgattttcctcactagctccccttcaaactgttcttctcctttagcttttaatatgagagggtccagtgctgagtattctgagtatttggtcctcttcccttctgtttatatacttacttccttggttatctaatccagtctccaaactgtggataaaccacccaaaatccaatcacttccaaatttctatctccagcccagacctttcccctgaactccagactgaatatctcaaaccaacacatcccaaagttggctcctgatctacttagggttttctctggtaagccagtgttcttttggtcctcaagctatctgcctcagaatcacctgggtactggtttgagatgatttctgcacctcgccccaggtaagccaagtcaaaatatctaagaaagggacccagaaatggcatttcagctagctgtttggttgtttcttaaagttctgcttggctcagaggggagccagatacaaagctgagaggtgaaatggttggctttgtttttgagaacattaactctagaagcaatggggaatagaggcagaaggtcatgccagggagatcagacctaagattatttaaaatactctttgatcgagatctgggggccttcagtcttatgctgagaaaacactacttttcattccctaaagcagtgaacctgaaatatagaaggcaggcaggctgtggcccctaccaagaatgctcctttctctaggaagaattctaaaaaatgtgagaggctagggagggaggttggagacttccactttttgtgtccttactatataccaggcactatagtagacacattatatgtatttgttataggcataccttagagatatcgcaggttctgttctagacaactacaataaagcaaatattgcaataaagcaagtcacacaaattttttgctttctggtatctaaaaaagttatgtttacactatactgcagtctgttaagtgtgcagtagctttatgtctaaataaacaatgtacataccctgattgaaaatactttattgctaaaattgctaatgatcacatgagccttaagggagttgtaatgtttttgctggtagagggtcttgccttgatgtgaatggtcattgacttatcgaggtagtgattgctggaggttggggtgtctgtggcaatttctttaaataagacaacagtgaagtttaccatatccatagactgttcctttcacaaaagattactctgtagtatgcaatgctgtgttttacccacagtagagcttctttgaaaattggagtcacttttctcaaaacctgctgctgcactatcacctaagtttatataatatcctaaatcctaaatcttttgttgtcatttcaacaatgctcacagcgtcttcaccaggagcagattgaatctcaagaaaccgctttctttgctcatccatgagacaagacccctcatgtgttcaaattttatgagattttagcaattcagtcacatctttgaactccacttctaattccagttcttttgctattcctaccacatatgcagttacttcctccatgaagtcttgaatccctcaaagtcatctataagggtttgaatcaacttcttccaaactgctgttaatgctgatgctttgactttctccgattaaccacaaatgttcttaatgacatctaaaatgatgaacgctttctaaaagattttcaatgtactttgcccagattcatcagaggaattacaatctatggcagctgtagcctaataaaatgagtttcttaagtcataaggcttgaaagtcagaattactcagtgatccatgggctgcagaatagatgttgtgttagcaggcatgaatacattaaccttcttgtacatttccatcagagctcatgggaatttttttttctaagcagtaggtctcaacagtgggcttaaagtagttagtggaccatgctgtaaatagatgtgctgtcactcaggctttgttgttccatttctagaacacaagcagagtagatttagcataattcttaagggccttaggaacttcagaatgataaatgaggattggctttaacttcaaatgcccagcttcattagcccctaacaagagagtcagcctttcctttgaagctttgaagccaggcattgacttctcctatctagctctgaaagttctaaatggcatctttttccaagagaagactgttttatctacattgaaaatctgttgtttagtgtagctaccttcatccatgggcttagctagatcttttggataacttgctgcagcttctacatcagcacttgctgcttcaccttgtacttttgtgttatgggaatggcttctttcctttaacctcataatccagcttctgttttcaaacttttcttttacagctttcatccctctctcacccttgatagaattgaagagaattatggccttgctctggattaggtttggctgaagggaatgttgtggctggcgtgatcctctatccagaccattaagcgtttctccatatcagctataaggctttttttgttttgtttttttgctttcttatcattcatgtgttcactggagtagcactttttaacttccttcaagaacatttcctttgcatttacaacttggctaactggtgcaagaggcctagcttttggcctgtcttggcttttgacattcctccctcacgaagcttaatctttctagcttttaatttaaggtgacacatatgcaacccttcctttcacttgaacatttagaggccattgtagggttgttaattggcctgatttcaatattgttgtgacacagggaataggaaatcatgaagaaagagacaaggacagaatgccaattggtggagcagtctgaacacacacatttatcagttaagtttattgtcttacatgggcaaggtttgtggcacccaaaaacaattacagtaataacatcaaagatctctgatcatagatcaccatagcagagatgataatgaaaaagtttgaaatattttgagaattactaaaacgtgacagagacaggaggtgaacatgtgctgttggaaaaatgatgcccatagtcttgctggatgcagggctgccacaaaccctgaatttgtaaaacatacaatatttgtgaagtacaattaagcaaagcgcaataagatacgatatgcttgtatctcccttaattttcagctaagagctgtttgagaagttactgccatctccttttttcagatataagaattaaaacaaggaaggaagttaactttcctaaagatacctagccagttagtaatggagctggtaaccaaacccagttctggcagactccaaaaattaaaccgctttcactaaagcacaccactgggcactgtgtttgaagcacgagatgatattagcaactgattgaagatttattgaaaagacttaaaactcttattgtagtcaagtcgtttaaaaatattttttacttttaaaatttattattatttagagacaggctggagtgcagtggcatgatcatagctcactgcagccttgaactcctgggctgaagtgatactcccacctcaacctccagatatttttttaatagacaaggctttgctttgttgcaggctggtctggaactcctggcctcaagcaatcctcccaaagtgctggagtttcaggcataaaccaccttgcctaggctcatttttttttttttttttttagacggagtctcattctgtctcccaggagtgtaatggcacaatctctgctcactgcaacctctgcctcccaggttcaagtgactctcctgcctcagcctccagagtagctgggattacaggtgcccaccaccaagcccacctaatttttttatttttagtagagacagggtttcactgtgttggctaggctggtctcaaactcctgaccttaagtgatctgcctgcctcagcctcccaaagtgctgggattacaggcgtgagccactgcacctggccagttcaaatcttatatattttggtgcctagacttaaataacatttaggaaaatgttaattaattatccatatagttctacctttttctttctttttttttttttttacaaagccagtttcaagtaagactggggagattctagaaagttataacagaatcttaagtcacttgatatgcctaaacagaatttgaagaaataatgaagttgaacacattgataaacttaggatttctgtaatcaggaagaaaaaactaaacttcatagatatgagggaaggaattaaccatttgcatgtatgtaactgttataatcctacatcagagtagcacaaggacatgaacaactttgttgacaaatagttttgtaattttttaatgttttttatgtagctgtcttaaactcctttctcaatagtatgtgaggtcaaatgattgtggtttctttttaaaattttgcatgtaatgtgtagttccttacattctctaaatgcttactgtttagctaactatgttattatggatgtcaattataactaagtacttcatacaatttcacgttttataagttagaagatatgtgaataattagggcatttggaagagttccagagagatttttttatttagaaagagaggagcagaacagcttcaggaaagatagatgaaaagctgattcattcaatttaagatagttgaagggaagaaaaaagaacacattatttagaatgatgacatgaagaacttaatttcctttttttacttatactttaagttctggggtacatgtgcagaacgtgcagttttgttacatagatatacacgtgccatggtggtttgctgcacccgtcaacccgtcacctacattaggtatttctcctaatgctatctctcccctagccccccatcccctgacaggcccaggtatgtaatgttcccctccctaagtccatgtgttctcattgctcaactcccacttatcagtgagacaatgcggtgtttggttttctgttcttgtgttagcttgctgatgatggtttccagcttcatccatgtccctgcgaagaacatgaactcattcttttttatggctgcatagtattccatggtgtatacgtgccacatttgcttaatccagtctgtcattgatggacatttggcttggttccaagtctttgctattgtgaatagtgcttcagtaaacatatgtgtgcctgtgtctttatagtagaatgatttataatcctctgggtttatacccagtaatgggattgctgggtcaaatggtaattctagttctagatccttgaggaattgctgcactgtcttccacaatggttgaactaatttacactcccaccaacagtgtaaaagctttcctatttctccacatcctctccagcatctgttgtttcctgactttttaatggttgccattccaactgccatgagatggtatcttattgtgattttgatttgcatttctctaatgactagtgatgatgagcattttttcatgtctgtcggctgcataaatgtctttttttgagaagtgtctgctcatatcctttgcccaatttatgaggttgttttttccttgtaaatttaagttccttctagattctggatattagtcctttgtcagatggatagattgcaaaaattttcttccattctgtaggttgcctgttccctctgatgatagtttcttttgctgtgcagaagttctttagtttaattagatcccatttgtcaattttggcttttgttgccattgcttttggtgttttagacatgaagtctctgcctacacctatctcctgaatagtgttgcctaggttttcttctaggatttttatggtttgcagtcttacatttaagtctttaatccatcttgagttaatttttgtataaggtgttaggaaggggtccagtttcagttttctgcttatggctagccagttttcccaacaccatttattaaacagggaatcctttccccattgcttgtttgagtcaagtttgtcaaagatcagatggttgtatatgtgtggtgttatttctgaggtctcttttctgtccattggtctatatatccgttttggtaccagtgccatgctgttttggttactgcagccttgtagtatagtttgaagtcaggtagtgtgatgcctccagctttgttctttttgcttaggattgtcttggctatgtgggctcttttttggttccatatgaagtttaaagtagctttttccaattctgtgaagaaagtcagtggtagcttgatggggataacattgaatgtataaattactttgggcagtatggccattttcactacattgattcttcctacccatgagcatggaatgtttttccatttgtttgtgtcctctctgattttcttgagcagtggtttgtagttctccttgaaaaggtccctaaaacttcatttctaaaaaaaaaaaaaaaaaaggaatatgctaccaaataggattctttaaatcaattgtctcctccttcagaaaacatccagaacctgacctcttatcaccacctccactgaccactttggtttaagccactcttattccccttcggatgtattgcagtggtctcctgacagtctcatttctatccttaccttcctagattccagaggttgagagtctgccctcgacttagaagccattgtgatactgttaaaatataagtcagatcatgttagccgtctgctccagtgtctccagtggtaccatatcttttagagaaaaatcaaatttcttacagtggccttcaaggccctacagcatctgcactctgctgcactctgattgtactatctactactcttctccctggcttagccagctctagccttactcacatcctcaaacaatccctgtcatctcttagcatcttagcaatttcttctttcctctctaattcctttccccaacactccccacttctccaacccattccagcttccagcttccagcttccatgagtatcctgaaacataacaaactttggttactgccagtgtctcacttaacacattcccccactacagtgttgtcaagttgtttcatttaacaccagtaacatttaatatcagtaatagccagattctatcttaggaaaaatatgcctaaaatttatttgctgaaaaaaaaagaaaagaaaaatttggataataatctgctttgagttattacaaacacagcagtatctgagaagcaagactgagtgtcataaggaaacaaccagattaaataaaagcatagctggatgagataagaaaatactgcagtgtgatccaaaatgcagtaacagagttaaaatccatattggtcgtcataaagagcaggaaataacaccaattatgtagagttcacatttaaggagttacttcggaatgaagagaaattggtaaactggtgaaaattacacactatgatttattgtttttattatgtaccagtcattgtggtaacatttcatctaatttagctcacttaatccatataacagccttataaaatgtttatctctatattatatgtgggaaaaactaagattttgattaaacaattttatcatgctgcagaaagtgacagaactgaatttgaatgaaagtctatttgactctaaagcatatggccttatcactatgctgttggacaacagatacgatgaatagagagcacatatgcaacccataaatatccagtgattctgaagaagaaactaaaaaacaaggcagcaaaagtattaattgattatagaaaatgactcttccttatgtatcttttttacgagatcatttctacattgtgtcaccagcacctagaacaatgttggcacatagtagatattcaagaaatatttgtttattgaactgtcataattactgttaagcatttattctgtgtctgttatggtgctatagattttatatacattattttaccctcaaagcaacttttaaactgttattttatagatgaggataatgtagtgccaagaagttaaatgatctgctcaaggttatatagctaataataggtggtagaacacgtataacagaagtaagtttagcagttaaataaaaattttactttttagatcaaaaggactcactgcatcccaggtaaatgtaattttaaaaagctaaaactttgcaatattggtaattttttaaaatttttcatgagaaggaaaaacaccctatatgcatttaagtaggattaataaaactggttaactactaagacataaaaattgggttgacattagatttcctctttgagtactaaatgctgagattggcaaaaattccatcaggttgagttgctattcttgggtgaagataacatatattcttatatatgtgagaggtcaggaatatgcccagtctttaccgaagtacttgtttgtctgatggttggactaatttgggattcctgtagtgtcctgtagttcagggtgaagtttagtaacatgcgggggtaagagacaggaggtgctattctctgccctgctgctcaccagtgtgctgtatccctcctcaggatcacccttaaggtctcagatgctcacacctggtgttcagtgcccagtggtctgttctctagccagtatattctgtgtcgtcttagattccagtccaaagactatttagatctgctccatccttgggaatttccacgcactttattatttcttctagggcaggggtccccaacctagaacaagcctacgatttgtgggtcataccatactgactttcaccatttcactccttgaactattgaacatacattatcatttctcctgccattttactcacctgctgctcacctcctgctgtgaatcaggccacacagcaggaggtgagcagcaggtgagtgagcattactgcctgagctgcacctcccatcagaccagtggtggcattagattctcatagcagcgcaaaccctattgcaaactgcgcgtgccagggatctaggttgtgctccttatgagaatctaactaatgcctgataatctgaagtggaacaatttcatcctgaaatcaccgcttcccccaaccccccccacccctcactgcccccagtccgtggaaaattcgtctttcatgaaacctgtccctggtgcaaaaaagattagggactgctgttctagagaaattaaatgtttttatgtctactttgttacaaggttacatgaaataaaccagttaaatgcttagtatattggtctctaatatactcaataagattttccttctctccttcaccccacacctttttccttcacttttatcaaaaatccttggatcttcatgaagatattttaaaacctactgatttgttattgtccagctgtctttcacactctgctagatagtcactcttcattccactttacatgaccatcccctgacttactaacgtgaaaaactggtctgaacctttgtctcattctgcatgcatcttcagaatatgctggattccagaaaacatacaaaaaactttaaggaatagtacagcgaatatctgtaatcaacaatttgaaggtaagttgcagacatcatgacatttcacctcttaaggctccaaaattcatgtcctaaggacaagaacatcttccattacaaccacaatattatcaccccaaaattttaacattgataaaacaattctaatattcagctagtattaaaatttcttcagtttttcccaaaatgttttgtatagaatgtttttttattcaggatccagtcaggaattgtgtattttacttggttagcaactctgtttagttttctttaatctaaaaagatctcccacctttttttgtctttcaggacattggcatttttttgggagtctaggccagccgttttgtagaaagttccataatctggctttgtctgatttttcccccacataattatatgccagttaaacgttttgacaagaatcctacacaggccaacggttctcagacactgatctcatgacccccttatgtgcttaaaaattgctacaagcccaaagagcttctgtatacgtgaattctctctctcagtatttactgtgttagaaattaaaactcataatgttttaaaactttttattagctcatttaaaaaacagcaaacccattagatactaatttttcaaaccaaaaaatttaatgacaagaatgacattgttttacatttttataagtcattttaatgtctatcttaatagaagacagctggattctcatatctggatctacagtcaatctgttccaatatgttgttttggtggaagcatgggaaggaaatgtggcctcacacagatatgtagttggaaaatggaggagtattttaattgtcttttcagacttgacaagtggtggccatttcattaggaattgcaaaaggatgattctctatttctattatcccttctgattttatcagctataaatatttttaatagttctctctctcttccaagaggcaatctggtaatcttaaaatacacttaataatggaaagcctaacagatacttattatttacttttaattttcagttttcaaagttgttaagtttgtgccctagtaatctccagtggtttccagtgagttcctcttgtttctttcattctttctcttcttacatatcattatgtactcatgttttttaaaatatatattcaatgtgttttaattacttgaaccagttctttttgatgttcaagtggttttaattttggttggtgtgaattatcagtggtcaatgaaacacaattttattagccctcagtaaaagcaaatcatctgtcacagcaaagcatcccaggctcaacttgcacatttcctgccctagtcctggatcagtcatttccccaaggagctctggttcgttttagatgaaaattatattacatgtgaaaatctgaattcctgctggagttgtctttacttttgggcattttcagtgaagagacctagaaaatacctctttttgaaaaagtaaggggatcatgagtttataccatgatttctcaacctcacactattgacctattgggccacataattgttgcagggggggatgtcctgtgcattatgggatgttattagcctttttggcctctctgcaataatacctaccctctagttgcataaaccaaaattgtctccagatattgtgaaatgtcctggtgaggaagggagcaaaattgcctctagttgagaattactggtttatgtttgtatttctagcaaaatcaaaataattactagttgttttatctgtatgtattgtgtgtgtgtgtgtgtgtgtgtgtgtgtggattcaaaatactagtatcagcattattacctctaacaacaaaacctgctttgtagactagttcttccatctcctgcataaaatcttaggccagtcccaaagattttaatcagaagaacaatctcattccactaaccgtattagtctgttctcatgctgctgtgaagaaatacctaagactgggtaatttataaaagaaagaggtttaattgactcacagttccacatggctgggaaggcctcaggaaacttacaatcatggcccaaggggaagtaaacatgtccttctttacaaggcagcaggagagagaatgagtgccagtaggggaaatgctagactcttataaaaccatcagatctcatgagaattcactgattgatcacactgctcatgatgatcacgagaagagcatggggggaaaccacccccatgattcaattacctcccactgagttcctcccacaacatggggggattatgggattacaattcaagatgaggtttgggtggtgacacaaagccaaaccatatcagtaatcaaaatgcccagggaagcattatgccaaatttacaaatcctcttctaagtttagatttcttctttgccccaattcagcactcactgctttgagcttgaagcctaaagggaagaacaaataagatctgcttcttctctgtttatgctgcctacactcacccaatgacagctgattttgacccttccagggccaacgtgtgggaagagaagttagagagcacagttttacacaacaagtaggaattttagtgtcactggggttatctgtgtttggtgggtgattacaggctgctcttcctctagtgggatactttggtgagattcatggagatactttactgagagcctctaactgtaatcctgtaatgctgtaatgcagtagacacctctcttctctctggacatgaccgtgaccctctgcttctggacttccgctgactgaccctacacagattctgttggatcacaatactctctaggttgtcctcttagctggagccagtttttaaaagaaagaaacttttattgataaatattttcagaaaagcactcaaagatgtagagcttatcagtaggtaaatgaaacgatgttattatcacccagaccaaaaaatttaaagatcattaggttcccagaagctccattttgccccttccaatcattccccaaaagtaaccgccatcccaatttctaacatgatagattggtttgaactattttagaactttatattaatggaatcagatagtatttttctatgtctgcttattttacacaacattatacttatgtagttcatccacattttgcatggagctagacatttattctcattgctgtataataatgcattgaataaataaaaccatttgtttacacattatgctgtaggtgatcatttgggttgttttcagattgaggctattatgaacactgctgctataaatattcttgtacaaatcttttattttttgcatgtggacacacctgtccctacagataagcttttcatttgcctctccaaggaccctggcaatttcactggtcctgtaccagtctttgttccttggcccaggttcctataccatgtgatagtgaaaattcacctcccattaaaggccaatattttattttgtttatgttgtttttggcataaatgatttttgtcctcaccctgaattttggacagattcctggctgcctggcattttctgtgtagtgttttctagccctgttttcattgctaaggcagtcttttaaggttctacatttttatgcatatagttcagccctgccactctcttccattgggactgaagtaatatatcccatcctctcatgggctttaaaccccatttcttatcttttaggcatttcttatatctgtatctgaaacttttttggatcactgcagagtccagttaagtttgttcctccagctttcatttcttttttcttttctggcttatagagatttacctacctttttttccagactgaaattaagcaacatgcttctattatattttatccagtatttctgtgtttgtggtagaaagattgccctcatatggaccagctcatgttgcttcaagcccgtgacttgtgggtcataccatactgactttcactatttcattccttaaactactgaacatatattatttcctgccatttgactatgtattttccccttcttttcaaaaatgccatgaaaaattgtgaactctctcagacctaagtgaactatgttcacttgtgctcatattgagaagcaacacaaacaatataggtctcttattttacaggtaagtccctttcttgtttctaataaagatattttatttcctaataaagatattttatttcctttaaagtggaattttgtcatctaaaatttttgtaagtcactaggcaaataaaatgatctaatcacattttgatagtgcttttattttcacagagtattttttattaagagtaacacttggggctgggcacggtggctcacgcctgtaatctcagcacttcaggaggccgaggcaggaggatcacaaggtcaggagatcgagaccatcctggctaacacggtgaaaccccatctctactaaaaatacaaaaaattagccagacgtggtggtgggcgcctgtagttccagctactcgggaggctgaggcaggggaatggcatgaatccaagaggcagagcttgcagtgagctgagatggctccaccgcactccagcctgagcgacggagcgagactccgctcaaaaaaaaaaaaaaaaagagtaacacttggaaataatcttgttagacttcacatttaattatggtctattactataaaaaggtgagaaattactgaataaaaagcattctgtaagaaaaaaagttaaaaggtggtaaaaaatcagaagcaagtgactatttactatatatgacaataagtgacatatgtcttatactgttgagtataactatatttacaaatataagcgaaacaataggtataattgtatatacacctatctaaaaaatatttatcaagctgtattttacacaagagttaaaagtatcaaactgagtagttcctactcttatagaacctagtagctatagacacaaagtatacaataggaatacattgaatgtgcagttggtacacagaagaaatgtctaaagcctttatgagagcagtcaggtaagaccagatgaggggagcagttaagccaaggcttgaaagacgagtgagattttgttaagttgataaattggaaggaagggaggaaagtcatagaggcatgagagagtttgggggtaatccaaggatgttagtactctggagcataaagaacatgggaaagagtatgtgattagaaagaaaagacataacagtttgaactcaccccctgctttccccaccctaaaatagatcagttttgcaaggagaaagaagcatagtgctctattaagctccccaggtttcaacaggggcagatgatgcatatattaagggagagagctagatagtggctcctagtggggtgaactcccctatttatcattatgccatgtaacctgtttgtggtggcttatagcttataagtgttcctaaatgtcttataactcctggtggtgataatgtaggtaaacagcaaagatggcagcaaatggaatgctctgagtggtttaatatagtgacgtgttttacacttgttgtagaatcacaatgttatgttggactgaggagaagaaataatacgcaatttgagccatcaacctacggtttatgagtgagtgagtggatctagacagggatgtgtttctcaaaaccagaatataaactgtgggctgttgtctgaagaaaatggtagcaactgatgttatgttagattttcatctttttctagatttccaggaaaatgttgtgacagggctaatgcacttgtgcctgacctttcttcacctgcatatacagccaggtacctgaagtagcgagtggctcccactgcattcattgcattcttggtggctctgagtcctggccatgcattatggttcagaggcaatgcctgggccccatgccaaattcccttagtcggctctagttggaactggctggctacaacatttctttaagccaaaacattgcttgagaagataaacctttaactgtactccccatattttgtttgcatgataatgcatctactttgcagttttgatggctcatcacttaatgttaaagatgatgaaaagttagagtgaattgagcttccagatttctttaagccattccagcctgtcacaggcagtctacaatgatatgagtcgtgccaacccctcaaggtcgtgacttcatgccagtgcccttaattattaaaaattatccttccaactcaaactttaaatattggacatctaagtcattttttcttccaaacttataagaattgcattctgtttggtaactataatttccttatttatactcatgtttaaatttatacttatgtttaaatttatttggtacttatcatcagtctcttcataccagacttcctacctcatacattgtctgctataacgtatctgttgttgactggattacatcttttggaagagcatactggggtcttatttcccaatttcatgcaagtttgagaatatctttaagttgcctttaaaactgaataacttgactagatatagacttcttggaccacatctagaaaaaatctaactatatttgagatttagatgtgtgataatcataattataatagacatttgttaagtacttgctatgtgccagactattctaagctcttacatgagcttgtgtattccttagatccaatccaaggtactaatgttatcttcattttaattgccaaatgtcatctagctactaagtgatgagattgacattcacacttaaacagtaactttctatactacctctcaagataattaacctaaaatgttttaactgtgtgaccttgagcatgttatttaacttctagatgcctcagttaactctgtataaaatgagaatattaatacctccaaaggttgctttgatgatgaaatgagttaatatatgtcaatagctcataacaatgcctggcacatagtaagtgcttaataattgtctgttgttcttttattatttttatttgtggatagtaagttgcagatctgagctttgaacaagcagtctggcctctgtaactttgctcttcggtactacaatgtagtgtcagcaattaagatggcattttaatttagtgggggaaaacatggattagtcagtaaatagtgttgggatatagtagatactcaatacttgttgaatgaatgagagttttataaaagtataaatacattaacttaaatattaacaaatagatattaaataccatttagatttgtatagacagtttggaaatactttagtctgttccactgcaataaaaaaataccttagactgggtagtttataaatacagaaatattttctgatggttctaaaggctgagaagtccaagatcaaggtggcacagattccatgtctggtaaaagcttgctgtcttcttccaagatggcgccccttgctgcatcctcacatggcagaaaggataaaaaggaccaaattcactccctcaagcccttttaaaagggtactgattccatccatggaggcagagaccccacctcttaatattgtcacattggggattaagtttcaatatgaattttgaaggggacacaaacattcaaaccatagcaagaaggaagcaaaaatgagaatagatgcatgattatcaaattgtaggttattttctgttttgaatttccttacgttcttatataatttctctaataatacaattcatgatataatttgtacagataaccacttagttgtattttgtatatattgagtttgaggtacctagaaatatgactggaaggtcagagctcatattgagattttgggaccatcagaagataatgagacagactacccacaaagtgtgtgcagtggcacaccacatataaggaataagcaaagtaagaggagttgacaaagggaatttaaaaggaagtgctggaaagacaggtcaagagtcagaaaagagaggccccaaaatatgaatcaatgggacaggtggggaaagaaattacctgaagcaaatgattcaggtcaggaaagcattcacagcatttaggaatgaaaaaatatttgatgatgttaagccattttataagaatagtgaatatacaagtcaaattaccacataggaataaaggaagttaggtagaaacagcaaatgtagatgatgttttcgacaactttgaggaccaaaaaaaggggaatgtattcagggagaatctagagtgagctagggttcctttttttggtgctggaacttttttggatggaaaaataatgagagagcaggacatcactggactggagagactaaagactttaggagagaaaggaggaaattgatggagcaagacttgaaagcagataggaaggaattgtttgaaggacaaaagcaaaaaccattggtaaggaggactctttgagacactgaataaggagatgatatcgtaggccattttagaaatgtaagtgagacagatcagcagcatgccagcttctggtgtttagatcagacctttttcctgcgtatttatgaccaaggagcagacagtaggacagcctctcttcaaacaattacatctgcgtgctctatttctcgaagtctgttttctgtatagagaaaaccttggtgggcgtggtggctcatgcctgtaatcccagcactttgggaggccaaggcgggcagatcacctgaggttgggagttcgagaccagcctgaccaacatgcagaaaccctgtctctactaaaaatacaaaattacccaggcgtggtggtgcatgcctgtaattccagctactcagaggctgaggcaggaaagttccttgaacccaggaggtggacgttgtggtgagccgagactgtgcctttgctttccaggctgggcaacaagagcgaaactccgtctgaaagaaaaagaatagaaaatcttgctattttctgttctctcttcttgtgagatatcagtatagggtagaaatagatgatcaactgatagactgacttacacacaccttgctctcacagtcactcctatagcctaaatatataacttgtggtaaaaaaaaaaaaaattagagtcaaatcagaaagtagtatgcagtacactctgctaacctcctgtaggactggcactatgtgcacaaaagtcagcaaagatatgaggcttcacagttaccctttattaggtgaaggcttaattcctgggactctaaacaagagatgaacactatgtgagtgtacatgaacataagtttatagaggcatgcatctttaagaaaatatttgtgcttttccagaaatgcatgaggtcaggaaccttcttgatatcagctgtcacatatataggccttttggcatttttgccctttgccgtttaggctaatcctttcccctgcttgattaagtacatgttttaggtacctctgagttcctttactaccaactttggccagaagactctgattttaatcttaactaatgtaaaatactacaggaaaatcccatgatcttttaaaattatgtgtcatgcttcagcagtataagtaggctgaagtaggctgatgatattaaaagactcacagtctgttttaaagaaatttattgggaaaaaaagagagtgtcaaaaatagtaaattaacgtttacatgtttaagctgaatttttttatttttgttaaatctaaataaattagattgttccgtgccttattaacatatttgtggtttaaaaatcattattgaatattaaattcatgtgccagacctttttaaaggcatccatagtttcctctacacaaagtgaccccagggtgatgtgcgatgtgtattgtctatacttctataaagtttctcctctttattgagtacttctatctgttttaagttcttcctttatcattatttctgttcaaggtattttctaatgtgtagtcaaaataaggcaggtattaaattcagtacaataagtgatcttttttacatgctcttccattgattccttaaagagagaaccagctctgggatttttccaatagaactaagcatttagatttttttttaaaaggtcttttccagaggcctcttcaattctttagtctgtatctgttttcttgaaggcatcaatgtcagaaagaaaggttttactagagtttgaccacctggtacaactaatgcttatcagaaacgtgtagctaatcttgaaatgacatctaaaggcaatctgatactgacaccattaagaagataaacagaaatctcttgcaaaagatttttaaaggagccctaggattgattcttcagctatgctcacctaatttaggctcctaaaggcacaggtaaagtactgagcagttttatagcttcaccaacattcagctgtgccaggcaggaagctggctgagtcatgcacttgctgatgtgtatctagtctctatttcagttgtcactgcatagaatttccagtgaatcttagatattgtaaataattttgactcattttgtttttttagggcagcacaactacttatgtgctggaagaaatgactgcatcgttgataaaatccgcagaaaaaactgcccagcatgtcgccttagaaagtgctgtcaggctggcatggtccttggaggtaattctgatgttttcatcaataatatactgtgtaatctttatactataaaactgtgtgtcagaaaattgcaatttcttattcatctttgtttttgttttttctgtcttgattattggcagtgactctgcacatgtgagtgtctgaatgaagcaaccaataccattccattaactttacagttttctagcacattgaggtctgttaagagaagaaaactcaattcatctatattgcctataagtagaggtaatgggcaatgtactgacctgtcattaagtaacatgtgtgggagtctaggctttgctgcccatctcctgtgtgaccacagctcttcctgggcatcagtctacttatctgtaaaacgagagcattaacattcctttcagctcaaaaaattgactctgcaaattggtcaggtacattgcttactagcttctccaagtgattgattaaagcaagattactgtaactggggtaggaatccatttgatgaagagttatattaataattcccttttcccatatttttattagaatctctaaaactttcagtaatatagcacacatttaaaaaattaatgtcagatagtgacagatagtttgaatgaaaacatagcagagtgagggagatcaagcgagccacagttatgcaagacacccgtactcccttgaattttttcacttagccacatcctgcacaacactgtctgggaatcgtagcttttacatctagatataactttttaaaaacataataaaaatattacataattgttaaagctaaaaatgttttttcagtgcactaactataaacagcttgtgttccatggacgttgtgtgtattttcctttgggaaatgctatatttagaccaatgcttgtcaagtttaaagcgtatacaactgtcacctcatttgtttttgcaaatgtgctggaccaaaattaatcacccaggtaacatactgggcactttacagtaattcatgtaattagatcacttatagaattttataatttcttgattaaagatttgttttcctaagttaagggcagtgattaggttgacagtagtgcctggcttaaggaggtgctcagtaactttctattaaatgaataaaaccacaacctcagcagattaaaattgtttttgagtcccacacctcaattaccacctctttgtatttctgtttcaactcagaagtcttaaggaacctcctaaattttagaaaatacaactttttcacaaaatcacacatctagtcaatgtcggagccagaagaaagacctgaaggtattctgaccctggcgcagccattgttttctccttggcatgcttgccttagaaagtagcagagcatctaatgctgacacttagattccattaagatctttaatcttgagtgttttcccaatgactttaaaagactcttcaattttatcaaagaatgaaaatggcggagttctggatagaaccttcagaatactcctggggatcagcaatataacctagagaaatttatgttatcttttaatattctagggctttatttatttatttttgagacagagtctcactctgtcgcccaggctggagtgcaatggtgcaatcttggctcactgcaacctctgcctcccaggttccagcgattctcctgccacaacctcccaagtagctggtatcataggcacccgccattacgcccagctaatttttgtattttagtagagatggggtttcaccatgttggccaggctggttttgaactcctgacctcaggtgatctgcccacctcggccttctaaagtgctgggattacaggcgtgagccactgcacccggcctttagcatattattcaagcatctgtaatcctttatcttctctaaccaaactgcttgttactttagcctgttattcctatgcttcccaagccatattctacgggcttcacagctattgctgcattttcataccttttatattacttatttgtttaactctactccctccatctctccctcctttccgtccctccctccctcccttccttcttctttccttcctccctcttctccctcaatcgctttctaatttgcaccccatccctttctttcagtaactgtatatcgagccctttctagttaccagatactattctaagttctgcgcatatagcagcaaagaaaatggacaaaattcctgccctcatagatcttacactgtgggaggacgagcaacaaatgtacatgtcaaataatgataagtgctgtggaaagatattaagcagagttagtggggattatcaggaagcagactcactactaaactcattagtctaatatttttgttttgcttagcctcttcctaagcaataatatctctgaaataatggatttgatatgccagttataatttttctaaaagacattaatatacattcttaactatttaaatatatattcgatgtaccacctaaaaactgcttgtataccataaatgattatgtgttaaactctgggaaagagtgtattagaccatttttttccagctatcgcagctctatttattttttcagcttttattttagcttcagtgggtacatgtgcaggtttgttacctgggtatattgtgtgacactaatgtttgaggtacaaatgatcccatcacctaggtactgaggtactgagcatagtactcaatagtttttcaaccctttcttcttcttccttcctcctctagtagtcctcagtttccattgttatgctcatgaatacccaatgtctagctcccacttataagtgagaacatgcagtatttggttttttgttcctgtgttaatttgcttagggtcttggcctacagctacatccatgctgctgcaaaggatgtgacttcgttcttttcatggctgcataatattccatggtgtatatatgccacattttctttgtccaatccactattaatgggtgcctcagttaattccatgtctttgcttttgtgagtagtgctgtgatgaacatgtgagtgcatgtgtctttctagtagaacaatttattttcttttggctatatatccagtaatgggattgctggtctaatggtagttctgttttaagttctttgagggccgggagcggtggctcatgcctgtaatcccagcactttgggaggccaacgcaggtggatcatgagttcaggagatggagaccatcctggctaacacagtgaaaccccgtctctactaaaaacacaaaaaaattagccaggcatggtggcaggcgcctgtagtcccacctacttgggaggctgaggcaggagaatggcatgaacctgggaggcggagcttgcagtgagctgagttcgcgccactgcactccagcctgggcgacagagcgagactgtctcaaaagaaaaaaaaatgtcttttgagaagtgttcaaaccaatttctaccgtggcagaactaatttacattcccaccaacagtatataagtattcccttttttccacagcctcaccagcatctattaggttttgagttttttgagttttcttttttgagacagagtctcactctgtcacccagactggagtgctgtggcacaattatggctcactgcagcctcaatctcctgggctcaagtgatcttcctacctcagcatcctgagtagctgagactacaggcacgcaccaccacacctggcaaactttttatttattttttttttgtaacgataaggtctcactttgttacccagtcaggtctcaaacttctgggctcaagtgatcctcccaaagtgctggaattacaggtgtgagccaccatgcctggcatgagtttttaataatagtcattctgattggtgtaagatggtatgtcattgtcgctttgatttgcatatcttaatgattagtgatatggagcattttaaatgtttgttggctgcttgtatgtctccttttgagaaatgtctgttcaagtcttttgcccatttttttggtgagattttttttttttgcttgttcaactgtttaagttccttatagattctggatattagacatttgttggaggcatagtttgtgaacatgttctcctattctgttggttgtctgttaactccattggtagtttattttgctgtgcagaaactctttagttgaattaggtctcacttgttaatttttgtttttgtttcaattgcttttgagaacttagttagaaattatttcccaaggctgatatccagaatcatatttcctagattttcttttaggattcctatggtttgaggtgttatatttaaatctttaatctaccttgaggtaatttttgtatatggtgaaatgtaggggtccaatttcattattctgcatgtgactaggtaggtatcccagcaccatttattgaataaggaatcctttctgcattgcttatttttgtcaacattgtcaaagatcagatggctgtaggtgtgcacctttatttctgggttctatattctgttccattggtctatgtgtctgctctcgtgccagtatcatgctgttttggttactgtagccttacagtatagtttggaattgggtaatgtgatgcctctgacttttctttttgtttaggactgctgtagttatttgggctcttttgattttatataaattttagaatagctttttctagttctggaaaaaatgtcgttggtagtttgataggaataacattgaatctgtaaattgctttggacagtatggccattttaacaatactgattcttctaatccatgaacatggaatgtttttacatgtgttagtgtcatctgtgatttcttttagcaatgttatgtagttatccatgtagaaatctttcatctgcttagttatatgtatacctaggtattttgtgtgtgtgtgtggctattttaaatgggattactttcttgatttggctctcaccttgaatgctatagttgtatagaaatggtactaatttttacatgttcattttgtgtcctgaaactttactgaagtcatttatcagttttaggagccttttggtggagtctttagggttttctagttataaaatcatgtaatatgcaagagagatagtttgacttctttttttcatgtttgaatgccttttatttccttctcttgcctgactgctctggctagcacttccagtgttaacaggagtggtgagagtgagcatccttaactttttccagatctcaaggaaaattcttccagcttttgcccattcagtctgatattggttgtgagtttgtcattttggtctcttattgtttttaggtatatttctttgttgcctagtttcttgagggtttttatcatgaagtggtattgcattttatcgaaagctgtttctgtgtctattgagatgatcatatggttttatttttaattcttctcatgtggtaaatcatatttattgatttgcatatattgagctaaccttccataccaggagtgaagccaacttgatcgtggtaaattaactttgatgtttgatttggtttgctagtgttttgttgagaatttttgtgtctgtgtttatcagagatattgtcctatagttttcctttctcatggtatctcttacaggttttggtatcagggtgatactggcttcagaaaacgagttagggaggagtctttccttctcgattttttgaaatagtttcagtagaattggtaccagctctactttgtgcatctggtagaatttagctgtgaatctctctggccagggctttctttttggttggtaagttttttattactaattccatttggaacccaatattggtctgttcagtgctttagttttttcctgatttaaacttgggacattgtgtgttttcaggaatttattcatttcctctagatattgtagtttgtgtgtgtagaggtgttcacaatagttatctaaggatctttcatatttctgtgggatcagttgtgatgtcacctttgtcatttctgtttgtgtttatttggatcttctctctttttttctttgttaatgtagctagcagtctatcaatcttatttatcctttaaaaaaataacttttggttttgttgattctttgtatagatttttgggtctcaatttcatttggttctgctctttagttcgtccttttcttctgctagctttagggatagtttgttcttgtttttttttttttttttttttttttagttcctctaggtgtgatgttaggtcattaatttgagatctttctaactttttgaggtaggcatttagagctgtaaactctcctcttaatattgtttttgctacattccagagattttggtatgttgtgtctgttttcatttattttaatttttttttatttctgccttgattttattgtttactcaaagttatccagagcaaactttttaatttccatgtaattgtgtggtttgtacagatcttcttgatgttggtttctctttgtattccactgtgacctgacagtatgactggcatgattttgactttttaaaatgtactgagtcttggtttatggccaaggatgtggtgaatcttggagtatatgttctgtgtacagatgagaagaatttacgttctgtggttgatgggtggattattctgtagatgtttattagatccaattggacaagcattgagtttaagtccagaatttctttgttagtcttctgccttgatgatctaatgctatcagtcccccactattgttgtgtggctttctaggtccttagaagtccttgttttatgaatctgggtgtgccagtgttgagggcgtatgtatttaggatagttaaatcttcttattgaactctttatcgttatgcccttatttttccttttttactgttgttaaagtctgttttatctaatctaagaatagcaacccctgctcttttttgttttctgtttgcatgctacatctttctccaaccctttactttgagcctatggttgtcattacatgtgagatgggtttcttgaatacagaagatggatgagtctggttttcctagctggtttgccactctgtgacttttttttttttttagatggagtcttactctgatgcccaggctggagtgcagtggcgcaatctcagctcactgcaacctccacctcccaggttcaagcaattctcctgtctcagcctccggagtagctgggattatatgcacctgccaccacggctggctaatttttgtatttttagtagagatggggttttaccttgttggtcaggctggtcttgaactcctggtctcaggtgatccacccgcctcagcctcccaaagttctgggattacaggtgtgagccactgtgcctggacccactctgtgacttttaaatgggacattgtattagtccattcttgtgctgctataaagtactacctgagactgggtaatttatgaagaaatgacatttaaatgactcatagttctacaagcttaacaggaagcatagctaggcaacgtcaggaaacttacaatcaaggcagaaggtgaaggggaagcaagaatatcttaccatggcagagtaggagaggtgggtcaggggagtgccacacacttttaaatcattatatcttgggagaacccactcactatcatgacaacagcatgggggaaatttgcctccatgatccaataacctcctaccaggttcctccctcaacattgggaattacaattcaacgtgagatttggatggggatacagagccaaaccatatcattctgcccctggcccctcccaaagcttatgtccttctcagttttcaaaacacaatcatgccttcccaacagtcccccaaagtcttaactcattccagcattaacccaaaagtccaagaccaaagtctcgtctgagacaaggcaagtcccttccacctatgatcttgtaatatcaaaaacaagttagttacttccaagatacaataggggtatgggcattgggtaaatactcccattttaaatgggagtaactggccaaaacaaaggagatacaggccccaagcaagttcaaaacccagcagggcagtcattaaatattaaagctccaaaataatctcttttgtctccatgcctcacatccagagcatactgatgcaagggatgggctcccaaggccttcagcagctccaccctgtggctctacaggatacagcccccacagctgcttttacaggctggcattgaatgcctgcaggtattccaggcacacaatgcaagctgttgatggatctacgattctgaggtctggttgatggtggtcctcttctcacagctccactaggcagtgccccagtgggaactctgtgcaggggctccaaccccacatttccctttcacactgtcctagtagaggttctccatgaggtctctgcgcttgaagcagacttctgcctggacatccaggcatttccatacatcctctgaaatctaggtggaggtttccaaacctcaactcttgccttcttcatacccgcaggcccaataccatgtggaagccaccagggctttgggtttgcatcctctgaagccctggcccaagctgtaccttggccccttttagcaacagctggagctggagcagctggaatgcagggcaccatgtcccaaggctgcacagagtagctaggccctgggcctggccctcaaaaccattaatccctcttaggcttctgtgcctgtgatgggaggggctgctgtgaaggtctctgaaatgccctggagacattttccccattgtcttgactgttaacatttgactcctctttactaatgcaaatttctgcagcaggcttgaattgctccccaggaaatgtttttttgtctctctcttttctaccacatggccaggctacaaatattccaatatattttttgctttgcttcacttttaaatgtaagttccaggttcagataatctcttttttcatgcatatgagcatacatgtttagaaacagccaggtcacatacatctggaatgctttgttgcttagaaattttttccaccagataccccaaatcatctctctcaagttcaaagcttcacagatctctaggacaggggcaaaatgccaccagtctttttgctaaagcatagcaagagtgacctttactccagttcccaataagttcctcactccatctgagaccacctaagcctagactcattgtccatgtcactatcagcattttggtcacaaccattcaacaagtctccaggaagttccaaacattcccatatctttctgtcttctgagccctgcaaactgttccaacctctgcccattactcagttccaaagtcactcccacattttcaggtatcttcttaactgtgctccactctcccagtaccaattttctgtattagctcattctcatactgttataaagaactacctgagactgggtaatttatgaagaaaagaactttaactgactcacagttctgcaggcttaacaggaagcatagctaggaggtctcaggaaacttacaatcatggtggaaggcaaatgggaagcaagcacgtcttaccagggcagagcagcagagagagagagagagagtgagaggggaagtgccaccacttttaaaccatcatatctcctgagagctcactcattatcacaacaacagtatgggggaaatgtgcccccatgatccaatcacctcccatcaggtccctccccaaacattaagaattaaaattcaacgtgagatttgggtgaggacacagaaccaaaccatatcaggcatttagaccatttacgttcaaggttaatttttatatgtgaggttttgatcccttgtttagttgttagctgtttgctttgttgtttctattgtgtttttgctttgtagggtgtgcaggctatgtgcttaagtgtgtttatgtggaagcaggtatggttcttttgcttccatgtttagaactcccatgtaaggatctcttgtaaggatggtctagtggtaacaaattcctttagcacttgattgcctggaaaagattttatttgtcctgcacttatgaagcatagtttggcaggatgtgaaattcttggttgaaatttcttttaagaacgctgaaaacaggcccccaatctctcctagcttgcaaacctctgctgagaaatctgttattatcctgatagagttccctttttatgtgatctgcacttttctctggctgcctttaagattttttctgtaatattgcctttgaacattctggtgactatataccttggtgatttttttttttttgagatggagccttactgtgtcacacaggctggagtgcagtggtgagatcttggctcactgcaacctccgccctccaagttccatggattctcctgcctcaacctcccgagtagctgggattacaggtgcctgccaccgtgtctggctaattttttgtatttttagtagagtcagggtttcaccgtcttggccaggctggtcttgaactcctcacctcatgatccacctgcctcagcctcccaaagtgctgggattacagacatgagtcaccacgcccagccagtgatgttcatgtttgtggtgtctcacagatgttctctggatttctagctctctagcaagattaggaaagttttcttgaattattccctcaactatattttccagtttgttttctttttctcctactttctgaggaatgccaataattcatagggtttttttgctttatataatcttatatttctcaaaaacagctcatttaaaataatttttttctttatttttatcagattgggttagttcacaagaccagccttcaagctttaaaattttttcttctgcttgatccagtctattgataacgaatttcaaaatataattgaaggctttaagtgagtttttcaattccagaagctactattgattttttttaagatgttcatgtctttcttaatttcctagattgctttagaagtttatgttggttttcaaccttgtctttgattacaatgaacttccttgcaatccatgctttgaattatttatgtgtcatttctgagtttccatcttggttagggaccattgctggaaagctagtgcaatcccttagtgatgtcactgcaatcagatttttcattatgccagaattcttgcactggtttcttctcatctggagacattggcacttcaaatttttgtacttattttcatgtgggtagtagtttttcttttttttttctttccctataatggtattattattattattttaataattttttttgtttcccttttaccccttttctagggcttgtgcctctaaagaatgctgggtaggatcttttcactttgattctacagccctatgtgcttctttcagcaggttttatactgggctctgcaggtcatcccacaggcccataggcggcacgtataggtaagagctggctgtgaccaatgtggctggatatatacttgatccttgtttccgagcaaaagctctccattgtcttaggcaataggctgattctgattcatagaatgcacagtagttggaactccctgctcagccccaaggagaagggaaccacaaagggcaagtttggaccgagcaggtccacctgcgtcccctgatggcaagcacaagcaccagtgccaaggaagaatccagtgggtggccaccaagcacccagagttgtacacagacctgaagcttggaaacctcctcagctgcaaattctctgcatgggaggcatcctaagctcctgattcaggagagtgggtgctccagatgcctggagatctgctttggcatggaatagagaggggccccctgcaccaagatctctacacaggaggggtaaatgacaattatatatagtgctgcaggaaacatgtgaatgcagataatatcttcaatataccagttttctttcttttggctatatgcccaacagtaggattgctgcatcacgtggtagttctgtttttagttttaggaacctccatactgttttccatagttacagtactaatttagattactaccaacagtgtacgagaatttctctttctccatatcctcaccagcatttattttttgtctttttagtaacagccattttaactggagtgagataatatcttattgtggttttatttgcatttccctgatgattagtgatgttgagcattttttcatatatctgttggcatttgtatgtcttctttcaagaaatttctgttcattttgcctatttttaaatgggattactttttttttttgctattgagctgagttccttatatattctgataattaactccttgtcagatgaatagttttcaaatattttctctcattctttgtctcttcacattgttaactatttcctttgctgtgcggaagctttttagcttgatgaaattccatttgtcaatttttgccttgattgcctatgccttgaggtcttactacaaaaatatttacccaaaagtcttaaagcagttccccaaagttttcttgtagtagttttgtagtttcagatcttacacttaagtctttaatcgattttgattttattttcgtatgtggtgagtgatagtgatctagttctgttttctgcatataggtagccagttttcccagcagcatttattgaagagattgccctttccccaatgtatatccatggcacctttgtcaaaaatgagttgactgttaatgcatggctttatttctgggttctctattctgttccattggtctttgtgtctgtttttataccaatatcatgctgttatggttaagaattctcatttctgacatagagaccatttaaataacaaaagataaaacatgagagaatattagaaagcttttaaaagatttaataaaatcttacagtagaataatagaggtaataaatatgttttgacatgtcatgacatagattttgttaggagcagtttgttcttatctgcttccgtggctatgttttgattataaaaattatgttttgagttatttgatttcttcgttgcatatgattcttgtctttaatgaatcacttccctaccttgaacaggtcacagtgaacttttgctttagttcactgctgtacagcactgagtgggaagatagttacacccttaaggatgataatatatcttctactttaggtgttctgcttccatcttctttcttctagaaaacatttttgtttaatgactcacaaaaaaatatctgaaatgaatacagctttatattttgcagttgtaaaaatgctaaactagtataaggtaattagctctttcaaaaataagtcgctttctacataaaagaatgattaaatgaatagttatcttctttgaaattttttaaatccacagttacaggttttatgggtttttctttttttctattattttcttttttggtagcaagccttatcttcacattttaaaaggttgtgttagaaagccagtttctctccttctccccctacctcctcctccacctagattcaaccacttcttatggcaaagagaataactttctgggctagagagtatgggttgtgtagtaaagatttttgttgtttttttgttttctcctcctacacttgacagccaacaaggctacaagtcttctttggaagaactgcaaaattcttgaatttaggacacagtggtatcttttctagaagtacagagtcctgctctgtgcctttaataccctaagaacaaaaatcatttttcctctttaaggcaagatctactgtgggtgatggctaccacctacctctctagacctcacagaatcttcttcttaatgggcatctctttttccacccaaatcctggcctttgaatcagcatctctcagagacagcacctctcacattgctccccaagttcactgcattggagcctgcagccaactgatgtccttctcatcagtctggttgtttaccctaaacaccatctcacacatgctagctggggatggtcctcagactattcattctcatttctttgcttaaaatttttctgtgtttgtatgggatgtcttttatggtttgccaactagaacttttcagtagtatctacaagcatttattattttctagactcagtaaaaagttagaattgaggggttcaaatatctcctccattgtagttgactttatttgaatgattaagacatatacatttaaaaaaatcaattctagtatagttttggtttttggaaaatacctgatttcactttatatttcctgttgtctagcatctttgttttctttgaagtatatacaaaggcacactgtgttttgatctggaaattggaggtgaatcctgaaaaatggaaggcaagcactatcagtgctataaaggattgttaaagtgtagtgccagtggactgatcccagcactgcgcagtggtcattatcattttggtaatctgaagtagaagcatgcctctagacatccttccataattttatataggtagtgtaaggatgactgtctataaattcacctgaactacagagagacttctgatataataaaagaaaaatacagagattgttcaggatgggaatacaaacactaggaaactggaaaagcaaattaaaacttctgaattaatagaaaaagttaaataggaaagagaaaataaagggaaacttgaccaaggtagcaaagaaagaaaatggaaaagaggtaattatgaggcagtataaaacaaactctgtcgcaaaaaaaaaaaaaaaaaaaaaaaaaattccatttgtagttttaaaaaaatagtaaagatatagaaaaattagtagaaaatacaaaaatctgtattcttcttttatcagaattaaataattatgcctgccctattttaccaaattattttattaaaacatgctaaagaagtttataagcttttcttctccctgctcccattctctataggatttttgctgagatatttcaaaatttttatttttaggttatatttaagctttcacttctaatctctctcaaaaacctttcatatcacttgtcataaaaatttcttctcatagtatcatcatccagattcagtcacatatacatcaagaataattgtgcaatactgtttcctagactcttcatcttatcttttcaatgcatgatatttaaataagccatactttttaatgttttcaattttttaatttatatttatttatttcaaattttttattatattttaagttctgggatacacgtgcagaacgtgaaggtttgttacataggtatacacgtgccatgatgttttgctgcacccatcaacccatcatctacattaggtatttcttctaatgttatccctcccttagccccccaccccccgacagatccctgtgtgtgacattcccctccctgtgtccatgtgttctcattgttcacctcccacttatgagagaacatgcagtgtttggttttctgttcttgtgttagtttgctctgaatgatggtttccagcttcatccatgtccctgcaaaggacatgaactcatcccttttgatagctcaatgttattgcatggtgtatatgtgccacattttctttatccagtctatcattgatgggcatttgggttggctccaaatctttactattgtgaatagtgctgcagtaaacatacgtgtgcatgtgtctttatggtacaatgatttataatcctttgggtacatacccagtaacgggattgctgggtcaaatggtatttctggttctagatccttgaggaatcaccacactgtcttctacaatggttgaactaatttacactgccaccaacagcgtaaaagctttcctatttctccacatcttttccggcatctattgtttcctgagtttttaatggtcatcattctaactggcatgaaatggcatctcattgtggtattgatttgcatttcgaccagtgatgatgagcttttttttcatgtttattgcccacataaatgtcttcttttgagaagtgtctgttcatatcctttgcccactttttgatggggttgttttttgtttttttttttgtaaatttgtttaaattctttgtagcttcttgatagtagtcctttgttagatggataaattgcagaaattttctcccattctgtaggttgcctgttcactctgatgatagtttcttttgctgtgcagaaggtctttagtttaattagatcccatttgtcaattttgtcttttgttgccattgcttttggtgttttagtcatgaagtctttgcccatgcctatgtcctgaatgatattgcccaggttttcctctagggtttttatggttttcagtcttacatttaagtctttgatctatcttgagttaatttttgtataaggtgtaaggaaggggtccactttcaattttctgtatatggctagccagtttccccaacaccatttattaaatagggaatcctttccccattgcttttttggtcagatttgtcaaagatcagatggtagatgtgtggcattatttctgaggcctctgttctgcttcattggtctatatatctgttttggtaccagtaccatgctgttttggctactgtagccttgtagtatagtttgaagtcagctagcctgatgcctccagctttgttctttttgcttaggattgtcttggttatatgggctcttttttggttccataggaaatttaaagtagttttttctaattctatgaagaaagtcaatgttagcttgttggggatagcattgaatctataaattactttggtcagtatggccattttcatgatattgattcttctgatccatgagcatagagtgtttttccatttgtgtcctctctgatttccttgagcgttgatttgtagttctccttgaaggggtccttcacatttctcgtgacttgtattcctagctattttactccttttgtagcaattgtgaatgggagttcagtcatgtttgggctctctgtttgtctattattggtgtataggaatgcctgtgatttttgcacatttattttgtatcctgagacttcactgaagttgcttatcagcttaaggagattttgggctgagatgatggagttttctaaatatacaatcatgtcctctacaaaaagacacagtttgacttcctctcttcctatttgaatacgctttatttctttctcttgcctgattgccctggccagaacttccactactatgtttaatagcagtggtgggaaaggacatccctgtcttgtgctggttttcaaagggaatgctttcagcttttgcctattcattatgatattcgctgtgggtttgccataaatagctcttattattttgagatacggtccatcaatacctagcttattgagagtttttagcatgaaggggtgttgaattttgttaaaggccttttctgcatctattgagataatcatgtggtttttgtcattggttctgtttatgtgatggattacgtttattaatgtgcgtatgttgatccaggctttcatctcagggatgaaactgacctgatcatggtggataagctttttgatgtgctgctggatttggattgccagtattttattgaggatttttgcatcaatattcatcagggatattggcctgaaattttcttttttgttgtttctctgccgggttttggtgtcaggatgataccaaataaaatgagttagggaggattccctctttttctattgtttggaatagttttagaaagaatggtgccagctcctccttgtatctctggtagaattcagctatgaatctgtctggtcctggggtttttttggttggtaggctattaattactgcctcaatttcagaacttgttattggtctattcaggaattcaacttcttcctggtttcatcttgggagggtgtatgtgtccaggaatgtatgcatttcttctagattttctagtttattttcatagaggtgtttatagtattctctgatggtagtttgtatttctgtgggatcactggtgatatcccctttatcattttttattgtgtctacttgattcttctctcccttctttattagtctggctagtggtctatctactttgttaatcttttcaaaaaaccagctcctggattcattgattttttttttttaagggtttttcatgtctctatctccttcggttctgctctggtcttagttatttcttgtcctctgctagcttttgaatttgtttgctcttgcttcgctagttcttttaattgtgatattagcgtgtcaattttagatcattcccactttctcctgtggacatttagtgctataaatttccctctaaacaaacactgctttagctgtgtcccagagattctggtatgttgtgtctttgttctcattggtttcaaataacttatttatttctgccttaatttcattatttatgcagtaatcattcaggagcaggttgttcagtttccatgtagttgtgcagttttgagtgagtttcttaatcctgagttctaatttgattgcactgtggtctgagaaactgtttgttattatttccattctttcacatttgctgaggagtgttttacttccaattatgtggtcaattttagaataagtgcaatgtggtgctgagaagaaggtatattctgttgatttggggtagagagttctgtagatgtctcttaggtccacttggtccagagcctgagttcaagtcctggatatccttattaattttctgtcttgttgatctgtctaatattgacagtagggtgttaaaagtctcccccattaatgtgtgggtgtctaagtctcttcataggcctctaagaacttgctttatgaatctgaatgctcctgtattgagtacgtatttttaggatagtcagctcttcttgttgcattgatccctttaccattatgtaatggccttctttgtcttttgatctttgttggtttaaagtctgttttatcagagactaggattgcaacccctgccttttttagctttccatttgcttggtaaatattcctccatccctttattttgagcatattgtgtctctgcctgtgagatgggtctcctgaatatagcacaccaatgggtcttgactctttatccagtttgctggtctgtgtcttttaattggggcatttagcccatttacatttaagggtaatagtattatgtgtgaatttgatcctgtcattatgatgctagctggttattttgcccattagttgatgcagtttcttcctagcatcgatggtctttacaatttggcatgtttttgcagtggctggtaccggttgttcctttccatgtttagtgcttccttcaggagctcttgtaaggcaggcctcgtggtgacaaaatctctcagcttttgcttgtctgtaaaggagtttatttctcctttgcttatgaagcttagtttggctggatatgaaattctgggttgaaaattcttttctttagaaatgttgaatattggcctccactctcttctggcatgtagggtttcagcagagagatctgctgttagtctgatgggcttccctttgtgggtaacccgactttctctttggctgcccttaacgttttttccttcatttcaatcttggtgaatctgacagttatgtgtcttggggttgctcttctcgaggagtatctttgtggtgttctctgtatttcctgaatttgaatgttggcctgtcttgctaggttggggaagttctcctggatactatcccgaagagtgttttccaacttggttccattctccccgtcactttcaggtacaccaatcaaacgtaagtttggtcttttcacatagtcccatatttcttggaggctttgtttgttccttttcattctttattctctaatcttgtattcatgctttatttcattcagttgatcttcaatctctgatatcctttcttctgcttgataaatttggctgctgatatttgtgtatgcttcacacagttcttgtgctgtgtttttcagctccatcaggtcatttatgttcttctctaaaatggttattctaggtagcaattcctctaaccttttttcaaggttcttagcttccttgcattgggttagaacatgctccattaactcagaggagtttgtcattacccgcctcctgaagcctacttctgtcaatttgtcaaactcattctccgtccagttttattcccttgctggtgaggagttgtgatcttttggaggagaagaggcattctgatttttggaattttcagcctttttgcactggtttttcctcatcttcatggatttatctacctttggtctttgatgttggtgaccttcagatggggtttttgtgtggacatcctttttgttgatgttgatgctattcctttctgtttgttagttttccttctaacagtcaggcccctctgctgcaggtctgctggagtttgctggaggtccactccagaccctgtttgcctgggtatcactagcggactctgcagtacagcaaagattgctgcctgttccttcctctggaatcttcatcccagcagggcacccaccagattgccagccagagctctcctgtgtgaggtgtctgtcgacccctgctgggaggtatctcccagtcaggaggcacaggggtcagggacccacttgaggaggcagtttgtcctttagcagagcttgagcactgcgctgggagatccgctggtctcttcagagccagcaggcaggaacgtttaagtctgctgaagctgcgcccacagccaccccttcccccaggttctctgtcccagggagatgggagttttatgtataagcccctgactggggctgctgcctttctttcagagatgccctgcccagagaggagtctagagaggcagtctggctacagcagctttgccatgctgcagtgggctctgcccagtttgaagttccaggtggttttgcttacactgtgaggggaaaactgcctactcaagcctcagtaatggtggacgcccctcccaccaccatgctccagcgtcccaggtcgacttcacactgctgtgctggcagcgagaatttcaagccagtgaatctcaacttactgggctctgtggggatggtatctgctgagctagatcacttggctccctggcttcagccccccttccaggggagtgaatggttctgtctcactggcattccaggtgccactggggtatgaaaaaaaactcctgcagctagttcattgtctgcccaaatggctgcccagttttgtgcttgaaacccagggccctggtgatttaggcacccaagggaatctcctggtctgtgggttgcaaagaccatggggaaagcatagtatctgggccggaacacattgttccttacagcacagtcactcacggcttcccttggctaagggagggagtttccccactctttgtacttcccgggtaaggcaatgccccaccctgcttcagctcgctctccatgggctgtagctactgtctagccagtcccaatgagatgaggtgggtacctcagttgaaaatgcagaaatcacccaccttctgtgttgatcgcgttgggagctacagaccggagctattcctattcagccatcttgccagccagcaaccactctactttttttttttttaatttaagttctgggatacatgtacagaatatgcaggtttgttacatagatatacatgtgccatggtggtttgctgcacccaacaatccatcatctacattagatgtttctactagtgctatccctcccctagctccccacccctcaacaggccctggtgtgtgatgttcctctccctgtgtccatgtgttctcattgttcacctcccacttatgagagaatatgcagtgtttggttttctgttcttgtgttaatttactaagaatggtttccagcttcatccatgtccctgcaaaagacatgaactcatcccttttgatggctgcatagtattccatggtgtatatgtgccacattttctttatccagtctctcactgatgaggatttgggttggctccaagtctttgctattgtgaatactgctgcagtaaacatacatgtgcatgtgtcttatggtacaatgatttataatcctttgggtatatacccagtaatgggattactgggtcaaatggcatttctggttctagatctttgaggaatcatcacactgtcttctacagtggttgaactaatttacactcccaccaacagtgtaaaagctttcctatttctccacatcctctccagcatctgttgtttcctgactttttaatgatcgccattctaactggtgtgagatggtatctcattgtggttttgatttgcatttctctcatgaccagtgaagatgagcttttttccatgttttttggccacataaatgtcttcttttgagaagtgtctattcatacccttcacccactttttgatgttttttttttcttgtaaatttgtttaagttccctgtagactctggatattagccctttgtcagatggataaattgcagagattttctcccattctataggttgcctgttcactccgatgatagtttcttttgctgtgcagaaggtctttagtttaattagatcccatttgtcaattttgtcttttgttgccattgcttttggtgttttagtcatgaagtctttgcccatgcctatgtcctgaatggtattgcctaggttttcttccaaggtttttatggttttaggtcttatgtttaagtctttagtccatcttgagttaatttttgtattaggtgtagggaaggggtccactttcagttttctgcatatggctagccagtttccccaacaccatttattaaatagggaatcctttccccattgttttttttggtcaggtttgtcaaagatcagatggttgtagatttgtgacgttacttctgaggcctctgttctgttctattgttctatatatctgtttgggtaccagtaccatgctgttttagttactgtagagttgaagtatagtttgaagtcaggtagcatgatacctccagctttgttcttttgacttaggatgtcttggctatacaggctcttttttggttccatatgaaatttaaagtaatttttttctaattttgtgaagaaagtcaatgttagcttgatggagctattattggatctataaattactttggtcactatggccattttcaaaatatacattcttcctatctatgaatatggaatgtttttccatttgtttgtgccctgatttccttgagcagtgttttgtagttctccttgaagaggcccttcacatcccttgtaagttgtattcctgggcatttaattctctttgtagcaattgtgaatgggagttcactcatgatttggctctctgtttgtctattattggtgtataggaatgactgtgatttttgcacattgattttgtatcctaagaataagccatactttttaatatattttattcataaaaaaatgcacataaagcaaatgacatatagaaacaatatgattaacatccacctctggactcagttggcttaagaaaatatgaatattatcactacacttgaaattgattgcatatttcttccttatcacattcctctttatctttctccagaaacctctatatctttaatttggagttggtcattttcttatattattctgtaggattttttaatatctatgtatttctcactaatagattttttagttttgagatgtttttttctactccatagaaatgctatgtatatttatgcaatttgatcttactgcctaatattatatttgtgttttttattttgatttgtattattctggtttgttttttcctacactgtatgatttcattgtatgagtatctcccatttatttattctcatgtattgacatgtacttccacttgatatttgctgtgctttacctacagttcaattgtgaacattattttacatgtattctggtggttcatgtgtgagagtttctgtaggtaacctgcacacctgggcatgaaatttctgactgtaatacatgctcatgctgggctttactagataatgctagattgtttttaaagtagtagtagtttacactccatggcagctcttcattgttttgtgtgttcctgtattctgtgtccttgccgttttaggtagatgatgtctcatgtggtcttactttgcatttctctggttaataatgaggtcagtcatattgttgtattttgtcatctatatatttcttcctctgtgaaatatctgttcatgccttttctttctgatttataggaattctttgtgtattttgggtatatatgttataaatatctataggatagataaaaacaagctatctgataaggcgatatgcagaaatataaattaggtgaggaagcaagccatgcaaatatccaaggaaaaaatcatttcatgcagaggaacttgtcagtgtaagaccccaaggcagaaacacacttcaagggcaagatgggcatcaatatgggtggagcatgagggagaatagaagagagaccatctatgcaagggtaagttgggccttgtagagcttgatatgaattttaacttcattctaagtaggatcaggagtcactgaaaatatcaagcaagaatgacatagtctgattaagtctttaaagttgtatagaaaatagtctacaaaaagtgaaagctgggaaaccagccagcatatgttacaatagtccaactgtgattgtggggacataaattatggtgcaagcagtggaaacaggtatttggatttgggttatattttcatggttatccactaggatttgctgatgtattagatatgaggtgagaaaataagtgaggtatcagtaatgactctagagtttggggctagagcagcaggtgtgtaaatgaagttacaaacctagaagatgcatgtttggaccaatgcatcaaagttctgctctaaacatattaatttgaggggtctgttagaaatacaagtggagatgctgagaatacagttgcatagttgagtctagagtttcttggaaaagctgggtctaggactgtaaatttggtaatcattaatgtctagatgatattagagacatagaactagatgcagacacctagaaagagcatagatatctaagagaagtctgaggactgagcttggtgtactcaaagatttagaagttgagaagatgaaaaagagctagacagagagactgaaagagtgactacaagaatgaaatatgtggaagccaaatgaataagagcgttaaaagaagaaggaaacgatcaatgtgttaagtacttacccgggttaagaccaggactgagaattggccattgttttttgacatttagaaatctttgaaggccttgccaagaataatttggttgggataaggagaggaatgacctgactggagaaggttcaagggagaattggaggagaggaaatgaagagagtgatatttctccacggaatacattatgtgtgagagggactattagaggatgcagacaagagggcaaatgatttcagagaaaagtccctgagtgggtgagaaggactaagatttggtattgaaatgtcaggagtatgaattgtaacaggagggaaggcagagtacaggggtagccatactgtagattggccacaaagaaaatattctccaaatggagcttctttccccctaagcctcccccaaatcattacctctgcttctgattcaatccctcaaaacctcatccatcagcttgaatgagagacaactattcagccaccatgtccatccgctttcttatccccccttgctcacccccagcgtctcagcccaaatcttccctccttccagccaacaaagctcccatgcctgtcatctcctgatgtcaatgcagcgggcaggggagtgggggaccactgaccccacatgcctattctctgcttagattacccaaaataccaggtgtcgttatttttcagaggtgcaaaaatataatacaaagtcattctaaactgtcactgaattcagagtactttttgccattgtctagtcactgaattcagagtactttttgccattgtcttattttctcaatcaacaaatgctaagagtacaattatatgaagttctacagatttatttgttacttgcattacttagtaatggttcttatgcataaaggttaggaataacttctttgaacaaatatcctatataaaaaaacaacaaagtggtttttaaaaatcacattgctgttcacattccctttttagtactctcttctcatattcttttttaagctatgttaggtcaaaacaactactttaataacttagcaaatatctatcaggagtccactgtgtagttagcagtttataaagcttcagatctacattagtgagtgaaatggacctagcccctatccttacagggcagcaagcctggtggaggaagctatgttctctgaaggcaacaaaaacagtcatgcgtcatttaagagtagggatacattttgagaaatgtgtcatgaagtagtcaatttcatcattgaacatcatagaatgcatttacgcagacttagatggtatagcctactacacacctaggctgtttggtgtagcccattgctcctgggctacaaaccgatacagcatgttactctgttgaattttgtaggcaactgtaatgcaatggtaagtatttgtgtacctaaacatatctaaagatagagacagtacagtaaaaaatactatcttatgaaaacactgttgtatatgtggtctgtcattgactgaaacaatattatgtagtgcaaaccatacagcaacagataataaagacaagatattcagagtgggagatggaaaagacaataatgtattccttcattcatttagcagacatgtattgccaaaagacactggaaaaaataaataaaggtgacaaacaggtggtgcctttgttgaagattatagtcatggacagggaaactttagccctcttcttaacattatcttcccttagacacaaacacacacacacacaattcctggcatatgctatatactccataactgttccttcccttccctttgtgactcattccttcccccagaaagctcatttgatctctgcaaataattttgaatcccctttgttttttaaccatggcaattgttttgttttcccatctcctacaagttttagctcaactcgttggggctgttttttttttttttttttttttttttttttttttttttttgaggtggagtttctcccttgtcacctgggctggagtgcaatggcatgatcttgactcactgcaacctctgcctcctgggttcaagtgattttcctgcctcagcctctggagtaactgggattacaggtgcccaccaccacacccagctaatttttgtatttttagtagagacggggtttcaccatgttggccaggctggtctcgaacttctgacctcaggtaatctgcccacctcggcctctcaaagtgctagaactacaggcatgagctcaccatgcctggccattccttggggctttatagaacaagtataatcctttttctttatgacaataccctgagttcagaaatctcagagacaaatgtttacagagaccaggtaaataagtagctagagtgacaagacttaagaaaagagaccattggcgtaccaccagtttgtggagggaactggaaaaactggaatacacatgccccatccaaaagcaaccattgcaactaaactttaacagattgttgccacctaagtaattcacggatggtctcataattctggtcagcattgtctgagccaaacaaaatgtatctatgggcatgatcagatactagagccagcagattgcaacctctgcttagataattgcaggtatcagccttcccttggctaaacagctacttcatactgataagtagcccttgcctggcacaaagcaggtggggctgaatccagcctgatatcacatcaccacaactttctctaattctcctcaaggcgtctgtgaactaccagcagcccaaataagcatccttttctccttcaatcatttctcataaagcagattctactcatctcaccatccatctttttcccctaacatatcagaattcatcaaagtagaaactccagaaatcatccagaaatacaaatgtgatctgaccagcacgggtataaactttctctttccttaatttagaaaaaggattattaattttgagtcttagatctcataaaagtagagctggattgattttaagggatcaatgaacctactgaaattgtataaaaagattttgtggggctggcaaacaaatgcttttcttttaacatattcttaaaagaacaaaacctcaaagaagatttaacaaccactatagactaagtttcaattaatgtagtctgtagcattagattttggaaggctgttctatcagaatatggaccaatactgagcgtagtcgctactaaaactctttgtctttttattcatatcttctcctaaaaagctccatgacccctgcagaatactggtataattacccacacctcacccacccagtgattgttgatgtaactaattatttaatccaagtctgaggcctaaattttttttaatcaagagttagttacatgttttaatttattttttgtaattttaatatctaacacttttattctatttcattcgattgatgctaaaatgcataatgctatgattctaagacttaggaaaaataatactatactgggatatggagtttatatatatttacatgaatttcttttttttcttctctgtaggtcgaaaatttaaaaagttcaataaagtcagagttgtgagagcactggatgctgttgctctcccacagccagtgggcgttccaaatgaaagccaagccctaagccagagattcactttttcaccaggtcaagacatacagttgattccaccactgatcaacctgttaatgagcattgaaccagatgtgatctatgcaggacatgacaacacaaaacctgacacctccagttctttgctgacaagtcttaatcaactaggcgagaggcaacttctttcagtagtcaagtggtctaaatcattgccaggtaataataatttttatatacagcatgtaataaaaaatatactatgtttgttgtattagtacattgttaaataaaacactctatgcagtaaattaactacaatataaaacagtatgtgatagtatgtgtttgagcagttcaaaatatttgtctaggaccctaatatgtgttacagaaatataaaaaattagagaacacactgagtcttactgatgagtcagaaattgcatacattaaacttatgctaataagaaatagcttaggtttatgtgttcaaccacagatattagagtagctcagaaatgataaatggaccattttttataaatgccctatttattctaacccttaattcaaccaacctcatttggttgaaaataaaactgaatgtataaagtcatataacaaatcaaagtagtattcagagtacagtaaggtgtcaaaagtaaattaagaaaacaaaattccctaacgtaaattactttaaaaaataatagcacacagagaaaagaatctctagtcactattcctctaatttatacccaaagagagtatatcgcccagcaacagagagaacttggattatatcatcacagaagaatttcagtcactttacttatcagctatttttgctccctcagcacagctctgtaggagccaagtacttgaaagaataacaaggatgaaattctcacttggttaaatcttagactgcagagccaggagaatacatgtatagcaattgtttgtgaaggcattactcctataattagaaatagaactttttaaaaaactacattctcttcacatcagtaatacccttatactgctatagacaaattatttttctaatatctgatcaagaattaaacatattatgtccttttagtccccaagtaaattcaatggcacttttagaaaaagaatttcttcccaattctccttaatataattctcagttattattctacctaaaaggtttgaaatacaatagatgaattgttactgaaaattcaattacatgaaacagaaagaaaaatagatacctgtttgttgaatctttcaaaaaatacatattaagaaaagttaatagaattcagtattctagtggagatgaagtaattttatagaaaaatcaaaatgcccagattcttactggcttcagtctcaccaaaaggccttaaacagacaataattttttgaacattctaaatgtttaagatttatcacatagtggttatcaaacttgacagagctttaataaataaaaataacccaatagcattgatgaactttttctgtttaaaaatgagtgtttaaacatgtgtttaatttttctccattgttctattatttggaaaatatgatttctttggtttttgttgatatagtttatattccttttgtttgcaattttggaggttctttactatttaaaaagattctagcatcagctggtaacgttagaaaataaccagttatacttgaaaagatgacttattcactttggataaaagctaagtgacctttttaaccggaaaccgttatctatcaggactttttgacccccacacaaccacaaaaaggaatgagagaaaactcttacattgaatttggtggcaacttttttaatgctgcaaaatgtaatttttgtgtagtaaatcagaataatggcaacactagtattacccatactgtttccattaattgcaaacagggaaacattgagattatcaaagtctcttgtggcctgtggacttttaaagccatattttcatggtctgcattttgggaatagcactattgaatgaattatgaaaatggtcagtgagctagagtgactatttgacctctgagaaaggacttggatggacacatgtatagaaagtactttagtattattagctacttaaaactgatttcaattgacttgaaataagcttacagtttttattcacttattcactcaataaatgtctattatgtacctgctgtgttcaatatctaataattatacagtggtttagaaagaaaagccacaaggctgggctcatggtgtggatgcattttggtacagcacatgctagcatctggtcatcagttttgcatgtaaaagaaatttatttcgttcattcactcatgtgtaataaaactaataagtctgtggaagacagacttttgttaagtgatcctcactaattagccagaatgtcaactaacttgcttatttacagtgagacacacacacacacacgcacacacacacaatataaatatacataatacttatgttgctaggagaatatattaacagatcagatcattctttcacaataggaaactgtatttggaaagtcacattaagatctgatgcagaatgaccatcataacaaaggtgacagcgtttatgaagacacctaggcatatatttgcaggtgccctaagaattcttattgcctggtagggctttctcatttcttctttgtctacactcttccattatcttggatctgttataataatggtagtttatatttcttcaaaaatatttcagatatatccttttgtttcttttcttttttttctttttttttttttttttttgagagagggtctcactctattgcccaggctggaccacagtggcatgatcttggctcattgcagcctggacctcttggtctcaagttatcctaccacctcagcctcctgatgagctggtagctgggactacaggcatgcgccaccttgcttggctaaattttttttatttttagttgaaattgggtttaactgttttacccaggctggtcttgaactcctggactcaagtgatctgcctgcctcagcctcccaaagtgctggaattacaaacatgactcaccgcaccccaccccttttactttaatagagacttgcaagatgctctagccttatgtcagcacgtttataaaccatctcttaggatacattgcaaatgagtgattttgcatgggcttttatctgtagccttagtgggcaatattttcttatttgaaatgtagagcaacacgatatttgaatttttttaatgaacaagacatattccctctattaaggaactctcaatccagtagcagagagaagatacccaaacaactatagtgttatgtgaaagtgatataagatacagatataatgaaagtggggacagaagaacatttttggcttcaaggactaaagaagccttcagagacaaaaatgtcagttaaactgcatcttacaggagaaacaagactttgataaatcatgataagagaaagcattctagatagaaggaacagtatggctgaaataagaaaagcatgagataggtttgctgaataatgcattaaaccagcatattaatggttctcaaccttttcaagtgtggggggtcccttagtaacatcaaaaattttatagtctccccatagggtagtaattaaagcttttagtagctatggattgagaaaacacatttgtacatacagtccctcggacactgctacagtaagtactggccttcgggagatttaatcacccaaatggtaagaaaccattgaaaagaaatttattttgaactgaataatggaaagtaaacttagaggtgtaagttataggctgatcaaggagggtcttaaaaattactgtagatgttagagtttaaattaaaagtactaattcacaattcggtgtcacctttaaattgtcctcatcctgtacatcaatacgttgcagtgaaattgatgtgacagagggggtatgagggaaacacttccgttgcataaattttgtcttgatatttcagttaacttagtgaaaactccatttaggtcaatgctttgaatttttaaaccttgcattttttaggacatactttattctttgtgtcatttcaccagactacttgcaattatcagtatcagaatattagaacagtattttgcctcatttttctgcttttgaagcgtgccaaaacaacttttgagtcagtgagtcattgcatcttgacagaggattttttctcttccttcccgaatcagaagactaaattaaattattgctctccagaaaaaaatgatgagagagaaatgagagtagcatactgagagtaaaggccttaataaatgtgttgataaagactaaaccatggtttttctcacaccctattccactgaaattatgattgccagtggcaacaaaaatttttacttgtcaaattagatgaatatttccagcccttaatgtgtttcacctacctctgggactattggcaaagtaactatttcttgctaagactcttgcttaggtatttgtcacttcccttccaggtagatatgtttctctccctatgtacatttcccgactcctgtgtggatttgttcttccacccacactataaatttgtttgtgttctgggttctatcttttccagtcatttctcactctacacagtctgcataagctcattcatagtcttgtcttcaactaccactatatttcgatgactcctaaatacataatattagccagaccctctacaaaactactgaactttcaactgcttattacacagctccacccagatgacttctaagtcagcatgaccccctaaacctaaggccttttccagtatcttgaaatggcacctcagcaagaatttttggtatcatccttggctcagtttctccttcaccccttacccaataaattgtcaaattctatcaactccacttattaaatatatgattcattatacatgctacttctgttgctacttccctgacttagtttggtgctggtctttttttacttggattcatgttgcagcctcctgactgattctattaccatcaatttcacgtggtgcccaaatgatcctctattctacccccagaatcatttttctaaaacaattttaatcaatcatattttccatttctttttccaaatagcatccaaactccatggcctcaatatccaagggctttctgtgatctggctcctgaatttgcagtgttaatctctcatcattcctcttcacacgactctaagatctagttccctaaatgctgtttgctcaaattctagccttcttctcttgcccatattatttttcctacctggcagcccatctcttttcccacgtcttcctttgactgacctgtaactatctttcaggattcgcattacttgtcacttgctctgggaagatttctctgagccttcctagactgggtgaggaaaccctgtaccctcccttgtctcctttgtgcttgtcaaccataacactatgactctgagttacaattgtgttctacttttctatctgtctcacaagcctatagtgttaaaggcagaaacagcatctttctaaccttgatcctaattgcaagtataatgcttcctcccaaatagatggttaaagaatatttatagaaatttaaattacagaattgatttgcaaagaactgtactaccttagattattagacattaacttcttattcagcataaatcatcaaacatacgttggtgattatacttaatcatattgaagcttctttgtgcttctcaacattgatacttgtgtatgaaagttgttgctttgtgtcagaaggtgctgagatatttaatgctctgccattgttgtagattatctgtttcaattacatgacattttttacagaaccaaaacctacatattttatcaaaactctgggagtaagattggggaacttagtagtactgtcatacaggccatcttttttttttttttttttcttgagataggctctcactctgtcacccaggctggagtgcagtggcatgattgtagctcacggcagcttagaactcctgggctcaagccatcgtcctgcttcagcctccccagtaacttcagcctccccagcactacaggtgtgcaccaccacacctggacaagctttttaaattggtttgtagagactgggtcttggctggtctcaaattcctggcctcaagtgactctcctgcctcgcctcccaaagcactgggactacgggcatgagccaccacacccagccccaggccatctcttcactatatactttctgttaattctttaagctaaatttggacagctgtaacagggcttttgtcagaaattatcaggtcaagtcacttaaaaggaaaagtgtttttttttttaacatttgttaaacacaattagtgataatccatcacttctccatgtgaaggtttttcattttggtcatctcaaatgtactaagtttacctgatcattatcatcactgggaatttaatctctgtgttcccatctttgtttcagcataaagtaatgaatgatattacagttaataaggaaaaaaatagcatttctatactaggcatgttcaagtcaatttaacattgtacatttatcacagataagcactgtaaaaggtggagtaaataaaggttattttctgagttctattccattctgtcaaacaaacagaaatatagtttctgctataaatattggtaattttataaatttaaagttattgtaataagatttgcctttaatgttgtcataaaataaaagtaagcctggatttctagtcccagaatgcaaaaacaaagaaaaaagcaaaaagacgaaaacaaaaactaagagtaggataaagtgaatgtaaacatgtaaatgtagacaggatctgtttttggataaagaacaatttaattcttacataattttgtaaaatgtttaaatgtttaaaactactcaaaggttaacataaaacaaatgcctgaagtgaaaaattacagcatagttaagtcaaatatttaaatattataaaatactttttttagaaagttataaagttcaccaagaaagatatagagaataataaatgtatttgtggagattattgtgaacacttggttaatgttttaatacatctgattaatgaaaacgaactttctatgagcctttttttttttttttttttttttttttttgagatggagtctcgctgtgtcaccaggctggagtgcagtggcacgttcttggctcactgcaacctcagcctcctgggttcaaaccattctcctgcctcatcctcccaagtagctgatgagactacaggcatacaccaccacacctagctaatttttgtatttttagtagagacagggttttaccatgctggccaagatggtctcaatctcttgaccttgtgatccacccacctcggcctcccaaagtgctgggattacaggcgtgagccactgcgcccagcccatttttttgtattatatgaaatatataatttgttatatataacaacacacataaaatatatattctggaaaatatatattccagaacaaacacataatttatctttaaaattttttcaccattattttttatacttcagttctatcttatatgttctataatatataaaatgcctcctaacacttttttttatggcattgtgttttagtattagagacttcccattaaactgactggtggatttcatactagtattactccaatgagcaattctgttgcattgatagaccaataataaatatctccatagtgttctacagtgtgcataattatcccatttgtctcatagcaactcactgagttagttatcattgtgaattgtgatttttacttatgaagaaatttagattcaatgataataagtgatgtttccaaagtggctgttagtaagtggtagagccaggactggaacttgggtcttctgtcctgaatgccttccaatttgttgagacagatcagcaatagggaggtttatatgtgcctccctttagaaaggcttccttttcaaaaattaagacaattcattgatctcttgtcaaatgattctaaattttatcacaaaattacccatttttatagtctcttaaatatttgacttacaagcagcatttatgtattagatttattgtattgagctttataattttcttaaaaagttattatgtagacctatacttgaagacacgttcaagtcatatgcaaattaaaaaatgataaaacttgcataccaaaaatttttttggctgcttagttagagagtctttctgcacctgagtaaaccaggattcttggatgccagtattaaaaataaactatgttaattataaaacacacaagcaacaacaaaaaaccctgacttttaaaaacaaaagaaaaagaaaaaaaataatttactgagaggacaacaggggttcactgaatagaagctagaggacaagcttagaatatgggcagaagccaaggcacatctgaagggctaaaaagcaagcatcacaaatcctcccattggttctcattatctggacaccaccaacatcaagaataaatagtcatatctttctctttgctttagtattttctgattcaaattcctgttagtatatgttccatgggccaaacctatgccccaagcccaaagaaggaggaggtttacccagctttctccgtgggaaagtaggaaggtaaggcatttgctctcgcaaaaactacaaccaatggggaactctgcccacacagagaaaggaaggaggggaggaaggaaggagggaaggaaagaaggaaagcaggaaggtattagggagcagtgagggaggaggaggaaaaagaggaaaggaagaaagagagggaaggaagaaaggagggagggaggaagggagtgagagaagaaaggagggagaaggggaagaaagaaaggagggaaaaggggagggaagaaaggaggaagaaggggagggaagaaaggagggagaaggggagggaagaaagggagaaggggagggaagaaagggagaaggggagggaagaaagggagaaggggagggaagaaaggagggagaaggggagggaggaaaggtgggaaggagaaaaggttagacattgaagagcatcccttctcagtaaaaggtaaatgctcactatggcatctctaattatgaatatgcatttgagtttttggtcttattgaggctaaggagttctaagaagagagtagcaatttttctactattcacatgaagatgggacgatctgaagtgtatgaagagaagagccttcttttttgctacctaccttgacatgattaacattgtcaggaaataactttcttttgctcttgatagctaatgaattaagttttgctttggttttacttttgaaacagattatttgtaagaacatcagtggatttttagagaaaatagatgtttttaaaacagctttatagaaagtggttgatgttctcagcaaaacattgtctccatacctttaattttaaaaattctccattttcatcatttcagttatactcagatacaaataactttcaaatttatattaatatttttagcccatatatctccccatacttctaattcatatgtgcagctgataccaggatgttgacccctgaatcctatccaaaactattttctccctagcaagtttcttctcctttattttatctcagcaatgctgttatcatcatctacccttcaagacaaatactgaaagatgtatttgattccttcttcttcccatctaccggcaatcagttgacaaatgtcttttatttttccctttaaatatttttctgatgcactctctcctcttaattccaatgtgttgacttgacttacttcaggcttttatcatctctcacctgggctttgacagtatctcccaactgtcctccctaactccagacttattcccttgaatccacctaccacatagctaagaatgatccatctacaatgcaaggctatgtcactcccattgctccttaatagacttgcaagaccttggatgatctgacccagcctacatctctaaacacatctttgcttctcccacctttaagttactcattgttgaactggtgatcttcccttgagaattgggaagacatggagagacttgtgatgattaagtcaagattcatttgccctttccctgccatccttctgccaccaacaccatggaacagcctaaaagaggatgaaagaccaaagcattcacaccataccccccaatacacacacacacacacacacacacacacacacacacacacacacacacacagattctaaatctcttaagccacacggaagtttaaaacaagactggattaagtttcagagaacgaaagtgacctgatgactgtggaatctacccgacatagttaagggttgttaaaagaaaattagatataacacaactgaaagcagtggttttacaaagtaagaccagtttatgtttaaatcccaaagaactgagatttaacgaactgattatattccattcaggcattatctctctttttttctagaaagtttttcctgacctccctcccgattgactgatacactcccttttaaccttctctaccccagcactcatgtgcttgtttctcctgttgagttgtgagctgcttttgaggctaggattgactcttactcatcttcatttttatacagtgcctggcacccaaatggttcttattaaatgggtgttgcatgaatgagtgatggatgatggattcacttagcaaaatcccagaaatgctaaatcacagtgactaatttcaagtgacttccaaagttgctgatattttaggctgtattatttattaatgttttctgattttcagtgtaaaatatgttgggattgaaaacattttattaccctacgcatacctattttcagatttatatgtattttcaacatttttgagataattcagtcatttttatggtcactgtatttttaaatttgttttgtaggttttcgaaacttacatattgatgaccagataactctcattcagtattcttggatgagcttaatggtgtttggtctaggatggagatcctacaaacacgtcagtgggcagatgctgtattttgcacctgatctaatactaaatgagtaagtagtaacttttgttgtttttgttattttaagtgtacatgtaggataattttgaaagttatatttcaatagatgatcacatatttagtgttcttgatatgatgacattactgtcattttacggtaattttatatttggagctttttcctcttgtttcaaaatatagttatatcaaatccaattttcttacacatcaagaatgtatcaagaaatatatttaaagataaacttaaatgtttcattaatcaatttaaaatttcatagcttggtactaatgacaataataaatgagaaatatttttgttactgacttacattcaaaaagtaaaaacatctttcttcatacatgacaaattagactgctaatttatttaaaaaattgaaagataaatatttcaatttgctttatatttaaataattttaattaattttctacctacaacctttaactgaataagaatcttttcatggtaatatttatattgttctagtggtaaatgctgacttagaagtatataactcacacttatataagtctttacagtttttagataattttcatgtttcattacattttatccaacaattccttgagataagtaaggaatcagcattcttcattgtacagtttagaaaactgagtctcaggagaattatataatctgccaaataatttgaatgacagtgagattccttatctctttttagccaaaatctagttttcattattcttgttagcttcatttgactaatgtggacattataaaacaacacaaggttgggaaaatgccttaattaaattttctcagccttcagcacttgtgtttaactttgtcaattaattaatgcttgccaatgtcctcttttactcttttctgtatcattgtatatttccctagaaaagtttaaaatatggtaagctttgtgaactgacttctcctatttaattgcacacaaaattatataatttttcatagaaaataaattgtaagtaaataaaacatttctgagcattcttcagcttcacattctcaactcctacacctctgctgtgttttcttggtttaggtatttaaagtgtgataataaaagtgagaaacaatgttaatcttggtcactgtgtatttaatataattttctagttttaagatttcttaacctcaaaaattcagtattgtgaaaagtttagaagatgtttaaaattccaaatattgggtttgtttattaaaagtagtagtcattttcaataatatgtaaggtaattaccaaaaccatattccctgataaattacctaaactggctgagacactattttttttcctgttgctttttcttttgtgtattgtgtgtgatgcaagacagcggatgaaagaatcatcattctattcattatgccttaccatgtggcagatcccacaggagtttgtcaagcttcaagttagccaagaagagttcctctgtatgaaagtattgttacttcttaatacaagtgagtgagttcaagtaacttaatgcaagatatctagtttcttaattcattagaaaagttgcaaacaatatgattatatagttatgtatgaggtagacgtcttggattataagtataaagaagaaatacccaatatattgttatagacattaataaaattactggattttttcatcttttacctaccatataatactaaaatagcctcatcaatttctttttattttagataaaatgatttaattactctttcatattcacctaattcagtaatataaactacagtcatgtgccacataataatattttggtcaacaacagaccacatatacaatggttccctaagatgatagtggagctgaaaaattatcatcgcctagtcctgttatagccaccataacatcatagcacaatgcactaatcacatgttcgtggtgatactaatgtaaacaaacctactgtgctgccagtcatataaagtatagcacatacaattatgtacagtacatagtacttggtaaagataataaaaaactcttactggtttatgtatttactgtagtatacttttctattgagagtcactacttctactttttttaagttaaccgcaaaacagcctcaggcaggtctgtcagagggattccagaaaagggcatacgtcaccctgggagatgacaactccgtgtgtgttactgccccctgaagaccttccagtgagataagatgttggggtggatgacagtgatattgatgattctgactctgtgtaggtctaggctaatgtgtgttttgggtattagtttttttaaaaaaagtttaagcaaaaaagaaaatatttaaaaatagataaagtttatagaataaagatatagagaaagaaagccaggcacggtggcatgtgcctgtagtccccactacttgggaggctgaggtgagaggatcacttgagcccaggagttttaagtccagcctaagcaacatgtgagaacttgtctctaaaaaaagaaagaaagagaactgtaccttgtgtttttgtttttaactaaatgttattacaaaagagtcaaaaagttaaaaaactagagtttataaagtaaaaaagttacggtaaggtaaagctaatttattataaaagaaataaaaatatttttataaatgtagtgtagcctaagtgtacagtgtttataaaggctatcgtagtgtatagtaatgtcctaggccttcacattctgtcaccactcactcgctgactcacgcagagcaacttccagtcctgcaagttccattcatgttaagtcccctatgcaagtgtcccattcgtatcttttatattggatttttactatgcctcttctgtgtttagatacaaaacacttaccattgtgttacagctgcctacagtattcagtaatcacatgctgtacaggttcatagcctaggaataaggcctaggtgtatagtagtctataccatctaggtttgtgtgagtacactctgtgataatcacacagtgatgaaatcacataaggacacatttctcagaatatatccccatcattaagtgatacacgactgcaattaatattggataagcacaaaccatactctcctctaccaccactctcaccccatccccaaagtatttactatataaaatacataattttgtttagaattatttttatcaagataaattgttaaaacatgtaactataaagattagcatcttaatataatagtggtttctttatcactgacacagtccagtgagttagcaagaaacacccaggctccttctagccagtggcttcaccccttcctagtggcttgcaaacctctattggacatgactagaaatgagcactgagtgagagagattttgaaggctagatctgaaactatcatacatcactttcacccacattccaaggcacttaagctgcaggaaaagctgggaaatacagtctagctataggcccagaagaaagaggaaattatgttttataaagcattgcattgatcaccagaaggacaggcaaatatccgttccactttttcttatatccaaggaacatacttacctctgcctcagtggatccccaagggtctgggtgggcaaagttttaaaaaaaagaaaaagcagctgctttgacccttgcataggcaggatcagccctcaaatgtacaaactgatgcttttgtgattcattgtgatttctatgacaaccacagggagctaagacctcaggccgagggtgagcctaaggtctttcttggcaacatctttacagggacttctttctaaggtcccaaatctcaaatggctagggggtgcagatcaggagggaagggcaggagagataaaccctgaaatggaaggcttcctcatagaatttatgcaaagacagggatgaatacataaccatcttgggaaccctatttggacaaggaatttcaaggctaatttggtgacagagcatcaattgaacaaaggatatttacgtggaaccggcccagagagtcaactggaatacatttaataatacagtaattagctcctgcccttctttgcatgaaggaatgaatcctatagcacttatgtcacagatagtcctagatcttccaaactggcttatatccttaacataattctctatttatggataggcaacattatgctggggaattaaacaacaatggaattaatcaacagggaggctttgctcattgttgtcacttagaaacttaggcgatcactagagcagtggtaagaaaaggaagtgagattcatacaacttccactcacataccatagagagtaagatttttagccatttgccacttcacaaaaaggaagaaaaagaaactatttaatgaatagtacttacgctttccacaaattctaatcaagattctaatgagatttggggagaagagggtgaacttgacaaacctactgaaaatccatctttaaaactagaagaataaatagataagcattataaaaatatgcagggaattagaaagctgctgttaattaatacagcatgggagaagagatatactgaacttttgggcaaatcagacaagtatatattagaatataaatagtatagtggaaaccacaaatcaatgagtctgaaacaaataaatgttaagaaaaatagttttatatttggaaaaaaactgtttggatatgtagctcaaattatatccttgaataacagataattgagttaaatgtaaacactcaaataattaaaaaacaagctagaagaaatagaaataatcttcaatctcaaataccttttataaaataaatgcaaggagaagattggcaaagtaaaactttgataatttggtagttatgaacttaaacctctcatttgccattaaatatgaaaatataaatctccaggaatagacagtaggttgaacaaacatttttacattgttctctccaaaattacactaaaggccagatgtagtcggtcacatttctaatcacactttgggagggcaagctgggcagatggcttgaacccaggagtttgagaccagcctaggcaacttggaaaaccccgtctctaaaaaaaaaaaaaaaaaaaaaaaaaaaaaaaaaaaaaaaaaaaattagccaggcgtagtggcaagtgcctgtagtcccaggtagccgggaaactgaggtgggaggatcacctcaacctaggaagtcgaggctgcagtgagccatgattgtgccactgtactcctgcctgggtgattgagtgagaccatgtctcaaaataaaaataaataaataaataaataaaaataaataaattacactaaaatcttagtaaagggatttactatgaaaaattaagaaaaaatgattttacattcatgtttacagctgagggaaatatagggattggttggtaaccttaaagagagctgtgaaagtttgaaatgactgctatttgaagtagtccagaaaattagtacagcctctatggaacaccatatggagatttctcaaaaaactataaatataactaccattctatctagcaatcccaccactggatatctacccaaaggaaaagaaatcattatgtcaaaaagacacctgcactcttgtttattacagcagtattcactatagcaaagataggaaatcaatccaagtgtgtatcaacagataataggataaagaaaatgtgatgtactcacacatatacatacatacacacacacacacacacacacacacacacaaaatggaatagtattcagcaatcaaaaagaatgaaagtgtgtcttttgcagcaacatggatggaacaggaagtcattatcttaagtgaaacaattcagagacaaagtcagataccacatgttctcgcttataagtgggagctaaataatgcatgtacatgggcatagagtatagaataattgacagtggtgccttagaaggctggaaaggtaggaggggggtgagacattacctaatggatacaatgtgcattattgggtgatggttataccaaaagctcagatttcaccactatgcaatatattcatgtaacaaaactgcacagatggtcattaaatttatacaaatttaataaaaagaggttctagatatacatatagatgtacatactagagttaagttttcaattgacaaaaatttgcatagatatactgaattgccagaattactcttcagagtctcctttatatacaagatcttgaaaactcaaaaccaaagaattaacttatttgtttttcataagtttgtatctctggccttcttttctaggggaaatggaaaccaagttttgattggggtgcaggggataaatacaggcttaagaaatagtaattttcctccctgttccctgagatacaacaatattggaattaggccaaggctgggcatggtggctcaagcccgtaattccagcactttgggaagctgaggtgggcgaatcacttgaggtgaggagttcaagaccagcctggccaatatagtgaaaccccatctctaccaaaaagacaaaaattagtcggacatgatggcacacacttgtaatcctagctactcaggaggctgaggcgggagaattgcttgaacatgggaggcggaggttgcagtgacctgagattgtgccactgaactccagcctgggcgacagagcaagaccctgtgtcaaaaaaaaaaaaaaaaaaaaaaaagcaattaggccaactaacaatcttggaatggcctctcagtgttccagtaaaagaaagagttgcaagtctgaggtagaaatgattaagcttaattaggaaggcatgtcaaaagttgatataggttgaaaactaggtctcctgagccaagcaactagccaagtttcaaatacaaagtaagagttcttgaaggactttaaaagtgccattccagtgaacacatgaatgataagcaaaaccgccttattgctgatatggagaaagttttagtggtctgaatagaagatcaaaccagccacaatattcccttaagcctaagcctcatccagaggaaggccctgattctcctcaatactaggaaggcaaagagatgtaaggaaggagcagaaaaaagtttgaagctagcagaagttggttcatgagatttaagaagccatttccataacaaagtataaggtgaagcagcaagtgctgatgcagaagctgcagcaagttacccagaagatctaggtaagattatcgctacttatgaaagtagctgtgctaaaaaacaggttttcagggtagataaaacagctttccactggaagaagatgtcatctaggactttcatagctacagagaacaagtcaatgtctgtcttcaaagcttcaaatgacaggttgactctcttgttaggggctaatgaagctggtgacttgaagctgaagctggtgacttgaagctgaagctaatgctcatttatcattctgaagatcctaaggcctttaagaattacgctcaatctgttctgcctgtggtttatgaatggaacaacaaagctggatgacagcacatctatttatggcatggtttactgaatattttgacccactattgagacttactgctcagaaaagaatactactttcaaatattattgctcattgacaatgcacctagtcagccaagagctcttatggatatatacaaggagattaatgttttcatttctgctaacacaacattcattctgtagttcatagatcaaagagtaattttccactttcatgtcttattatttaagaaatatattttgtaaagctgtggctgccatagatagtgtttcctctgatggatctgggtaaagtaaattgaaaaccttctagaaaggattcacctttctagatgccattaagaacattcgtgattcatgggagaaggtgaaaatagcaacattaacaagagtttggaagaagtttatttcatccctcttgcatgactttgagggtgttcaaaacttcagtggaggaaataactacagatatgtgaaaagagcaagagaactaaaattagaagtaaagcctgaagacatgactgaattgaagaggtttcgtggtaaaacttgaaagatgaggagttgtttcttatggatgagcaaagaaagtggtttcttgagttggaatctacttctagtgaagatgctatgaagattattgaagtgacaacaaaggatttcggagattacataaacttagttgataatgcagcagcaggacttaagaggattgactccaattatgaaagaagttctattgtgggtaaattgccatcaaactgctagcattgcatgctacagaaaaattattcacaaaagagtcaactgatgcagcaaacttcattgttgccttattttgagaaactgtcatagccaccccaaccttcagcaaccaccaccctggccaatcagcagccatcaacatttagacaacaccctccaacagcaaaaagattttgactcagggaagactcagatgattgttaccattttctagcaataaagtgttttttagttaaggtgtgttcactttttaaataatgctgttgcacacttaatacattctagtatagtgtaaatataacttctacgtggactgggaaacaaaaagatgcatgtgattcactttgttgcaatatttccttcattgccgtggtctggaaccaaaccggctatatctccaagatatgcctgtgtaacaaagtggctggatataagataaatatttaaatattaatacctttctcccatatcagcaggaaggcattagaaaacttaatgaagcaatttttaaaattacaacaaaaagataaatcatctaggaataatcttaatggcaaatacttgagatttatataaagaagacaaaagtttactaagagatccaagtattcattaaaaagaagggaaaaaaaagatccagattacatgcagctgtaaactaagtcaaaccaagtatttaagaagcatgtagaataaggccaggttctcttttgagcaaatgctaagttaaatgcacaatccattgatacaggtctaaaataggtcagctgaagtgttctttaatatacctattaattcttatgttcttccagtgaactagaagtttatatgtcctgatattgatagtgatatcaataacactatctctttcctatataaggtgttttttttctagagtcatgtatcagaagaaatcattatatagctcagaaatatatgttataaattgttaatgtcatctttttatacacaactgccacttttaattgtcttcttaacagttcctttggaagggctacgaagtcaaacccagtttgaggagatgaggtcaagctacattagagagctcatcaaggcaattggtttgaggcaaaaaggagttgtgtcgagctcacagcgtttctatcaacttacaaaacttcttgataacttgcatgatgtaagtatttggttgattccagaatatcaatgattattctctgaatttctataactttttaaatgttacatgtaaattttactttgtatgattttctcagattaatacttgtatgttaaaagtgtttggatcatgctgctcagactttttattgtgtttttttttcattttcaatatagaccactcaaatattcttttacaagtatttgtataatgtgagggtaatttaatagctgatagaaattatggtacatttcctgaatatgttctaaaatatttgtgcctaaaattataaaagattttatatatacagtaaaaacaaaggtatgtatgtgaaaaataagactcatgccattttcagtggaattataaataacattgctgatgggtgggcaatcaggcaatacatagcaaaagttaaaatttgcatgcttttcaagtttctattttttaggatttatcttaaagaaataattagacaaatgtaatatacatgcaaggatgttcaccatagcagagggggaaaaaagaaaagcaaacaagaaatgcccaacaccagaggtggattactaagacaagatatctgtggtttgtcaagatatatgaaatacaagcttttattgctactatgttcagatcacattaaaatgacagtgaaggcataaaaaagctatccactctccaggtcaacttttgaggtcttactcctgaatacgaacagacagccaagattatgagctatttgagtaaagcctctaaaatgaaaggcagaaagcaaaataaaaagaaacttgaaggaaataaacaccagtgcagagaacagaagaaaacttctaacatcctcagagaaataagaatgatacggtatccatgacatgagaacagaaaacatttttaaaacagacatttagcaagaaaatacttttggataattaaatgaagaaaggcagaaattgaaaattcaatgaaagggctgaaatggaaaggaaaatctgaggaaaaataaaagatcaaaacatggaaaattagaaagaagagttatagtaaatttagtattcaggagattctagcctccaattaataggaatgtccagaagaaaaaatagagaaaatcaaggagagaaatttgtgtaagaaatcgcaaaagttgctggaactgaaacatacaagttttctaacaaaaagggtccggtgtagaggcactgcacaattgaactaaggtacattattgtaaaattgtaccaggccagaaatgaagagaatattttaaagtataccagtgatgaaagaaacaggtcacatagacgttatcaggattcagaatgatgttggacttctctgcagcaacactggaagccagaagacagtggagcagtgccttcagaatttgatggaaaagaaaatcttcaaagaatttcatacctagccaaaccatcaaacaagtacaatggcagcatgaaagtattttccaacttgcaaggtctcctagagtttacctcagatacaactttctcaagaactgctacaggatgtcttataacaaaacatgggattaagccaaagatccaccccaacagagatgcaaagtgatgtcccagaacaataactgtgcagagcagtagttagtctagatgggagcagtaatacaaagggttctaggataccagctccaggaaaaataaatggaactgagagattaccactaagtatgactgtaattgaggtgatttttacaattctgttgcagaatttgactatggctttgagacaaatatagagaaaacaaagcaaacaagaacacgaggtgattcacttttgcaaaataaaaataagtcgtaagaatggagatgcaatccagcagaaaaccataaaaaaatctttatgatataaatgctggatattgactttagctaaaaattgagccaaaagctctctctggggagaagagaacatgtatgtagttgaggaagagagtgtctagtataagagagcttcattttcttcatttcctatagtagaaactaaaactaactttagtggaaatatagaaatatcaaaagacacaggctacaaaaagttgaaggtagttgtgtctagggagctggaatagggatgggaagaagtctatcaggaaactgctaggctctattgatgctgctgctgctgctgtttttgtttttataatcatgtggtactacttgactttcaacattatacacatgaattactttgataaaaattaaacgatgttggattattggcataggaagaaccaatatgttgttatataaaacagctagattagcaaatagaatttatgaaacatgtgtaatattgtgtgtatgcttgggtatgtctgtatacatgtataaaaagaaaaaaaaacttgagtaatacaccaaaatgttcacacagcttatcctgtagaattgtgaataactttcatttctttaaataaatctttccataatatcagaatgttctatcatgagtatataacattttacatattattctagaaaatggtgggagttattttcactatggtaagaaaaaaacaccttgagaagtatttatattataaatagttagaaaaataaattgccatgtttgaatagcatatgaatttattatttttattacatgttttctactcatttgttaaaccaacagcttgtcaaacaacttcatctgtactgcttgaatacatttatccagtcccgggcactgagtgttgaatttccagaaatgatgtctgaagttattgctgcacaattacccaagatattggcagggatggtgaaaccccttctctttcataaaaagtgaatgtcatctttttcttttaaagaattaaattttgtggtatgtctttttgttttggtcaggattatgaggtcttgagtttttataatgttcttctgaaagccttacatttataacatcatagtgtgtaaatttaaaagaaaaattgtgaggttctaattattttcttttataaagtataattagaatgtttaactgttttgtttacccatattttcttgaagaatttacaagattgaaaaagtactaaaattgttaaagtaaactatcttatccatattatttcataccatgtaggtgaggatttttaacttttgcatctaacaaatcatcgacttaagagaaaaaatcttacatgtaataacacaaagctattatatgttatttctaggtaactccctttgtgtcaattatatttccaaaaatgaacctttaaaatggtatgcaaaattttgtctatatatatttgtgtgaggaggaaattcataactttcctcagattttcaaaagtatttttaatgcaaaaaatgtagaaagagtttaaaaccactaaaatagattgatgttcttcaaactaggcaaaacaactcatatgttaagaccattttccagattggaaacacaaatctcttaggaagttaataagtagattcatatcattatgcaaatagtattgtgggttttgtaggtttttaaaataaccttttttggggagagaattgtcctctaatgaggtattgcgagtggacataagaaatcagaagattatggcctaactgtactccttaccaactgtggcatgctgaaagttagtcactcttactgattctcaattctctcacctttgaaagtagtaaaatatctttcctgccaattgctcctttgggtcagagcttattaacatcttttcaaatcaaaggaaagaagaaagggagaggaggaggagggaggtatcaattcacatacctttctcctctttatcctccactatcatgaattcatattatgtttcagccatgcaaatctttttaccatgaaatttcttccagaattttccccctttgacacaaattccatgcatgtttcaaccttcgagactcagccaaatgtcatttctgtaaaatcttccctgagtcttccaagcagtaatttgccttctcctagagtttacctgccattttgtgcacatttgagttacagtagcatgttattttacaattgtgactctcctgggagtctgggagccatataaagtggtcaatagtgtttgctgactgagagttgaatgacattttctctctgtcttggtattactgtagatttcgatcattctttggttacatttctgcatatttctgtacccatgactttatcactttcttctcccatgctttatctccatcaattatcttcattacttttaaattttccacctttgcttcctactttgtgagatctctccctttactgactataacatagaagaatagaagtgtattttatgtgtcttaaggacaatactttagattccttgttctaagtttttaaactgaatgaatggaatattatttctctccctaagcaaaattccacaaaacaattatttcttatgtttatgtagccttaaattgttttgtactgtaaacctcagcataaaaactttcttcatttctaatttcattcaacaaatattgattgaatacctggtattagcacaagaaaaatgtgctaataagccttatgagaatttggagctgaagaaagacatataactcaggaaagttacagtccagtagtaggtataaattacagtgcctgataaataggcattttaatatttgtacactcaacgtatactaggtaggtgcaaaacatttacatataattttactgatacccatgcagcacaaaggtactaactttaaatattaaataacacctttatgtgtcagtaattcatttgcattaaatcttattgaaaaggctttcaatatattttccccacaaatgtcatcccaagaaaaaagtatttttaacatctcccaaatataatagttacaggaaatctacctctgtgagagtgacacctctcagaatgaactgtgtgacacaagaaaatgaatgtaggtctatccaaaaaaaaccccaagaaacaaaaacaatattattagccctttatgcttaagtgatggactcagggaacagttgatgttgtgatcattttattatctgattcttgttactttgaattaaaccaatattttgatgatataaatcatttccaccagcatatatttaatttccataataactttaaaattttctaatttcactcaactatgagggaatagaatgtggtggccacaggtttggcttttgttaaaatgtttgatatcttcgatgttgatctctgtctgcaatgtagatgtctaaacactaggatttaatatttaaggctaagctttaaaaataaagtacctttttaaaaagaatatggcttcaccaaatggaaaatacctaatttctaaatctttttctctacaaagtcctatctactaatgtctccattactatttagtcatcataaccattatcttcattttacatgtcgtgttctttctggtagctctaaaatgacactaaatcataagaagacaggttacatatcaggaaatacttgaaggttactgaaatagattcttgagttaatgaaaatattttctgtaaaaaggtttgaaaagccatttgagtctaaagcattatacctccattatcagtagttatgtgacaattgtgtgtgtgtttaatgtttaaagatgtggcactttttaataaggcaatgctatgctattttttcccatttaacattaagataatttattgctatacagatgatatggaaatatgatgaacaatattttttttgccaaaactatgccttgtaagtagccatggaatgtcaacctgtaacttaaattatccacagatagtcatgtgtttgatgatgggcactgtggagataactgacataggactgtgccccccttctctgccacttactagctggatgagattaagcaagtcatttaactgctctgattaaacctgcctttcccaagtgctttgtaatgaatagaaatggaaaccaaaaaaaacgtatacaggccttcagaaatagtaattgctactattttgttttcattaagccatagttctggctataattttatcaaactcaccagctatattctacagtgaaagcaggattctagaaagtctcactgttttatttatgtcaccatgtgctatgatatatttggttgaattcatttgaaattagggctggaagtattcaagtaatttcttctgctgaaaaaatacagtgttttgagtttagggcctgttttatcaaagttctaaagagcctatcactcttccattgtagacattttaaaataatgacactgattttaacatttttaagtgtctttttagaacagagagcctgactagaacacagcccctccaaaaacccatgctcaaattatttttactatggcagcaattccacaaaagggaacaatgggtttagaaattacaatgaagtcatcaacccaaaaaacatccctatccctaagaaggttatgatataaaatgcccacaagaaatctatgtctgctttaatctgtcttttattgctttggaaggatggctattacatttttagtttttgctgtgaatacctgagcagtttctctcatccatacttatccttcacacatcagaagtcaggatagaatatgaatcattttaaaaacttttacaactccagagccatgtgcataagaagcattcaaaacttgccaaaacatacattttttttcaaatttaaagatactctatttttgtattcaatagctcaacaactgtggtccccactgataaagtgaagtggacaaggagacaagtaatggcataagtttgtttttcccaaagtatgcctgttcaatagccattggatgtgggaaatttctacatctcttaaaattttacagaaaatacatagccagatagtctagcaaaagttcaccaagtcctaaattgcttatccttacttcactaagtcatgaaatcattttaatgaaaagaacatcacctaggttttgtggtttctttttttcttattcatggctgagtgaaaacaacaatctctgtttctccctagcatctgtggactatttaatgtaccattattccacactctatggtccttactaaatacaaaattgaacaaaaagcagtaaaacaactgactcttcacccatattataaaatataatccaagccagattagtcaacatccataagatgaatccaagctgaactgggcctagattattgagttcaggttggatcacatccctatttattaataaacttaggaaagaaggccttacagaccatcagttagctggagctaatagaacctacacttctaaagttcggcctagaatcaatgtggccttaaaagctgaaaagaagcaggaaagaacagttttcttcaataatttgtccaccctgtcactggagaaaatttaagaatttgggggtgttggtagtaagttaaacacagcagctgttcatggcagaaattattcaatacataccttctctgaatatcctataaccaaagcaaagaaaaacaccaaggggtttgttctcctccttggagttgacctcattccaaggcagagctcaggtcacaggcacaggggctgcgcccaagcttgtccgcagccttatgcagctgtggagtctggaagactgttgcaggactgctggcctagtcccagaatgtcagcctcattttcgatttactggctcttgttgctgtatgtcatgctgaccttattgttaaacacaggtttgtttgctttttttccactcatggagacatgggagaggcattatttttaagctggttgaaagctttaaccgataaagcatttttagagaaatgtgaatcaggcagctaagaaagcatactctgtccattacggtaaagaaaatgcacagattattaactctgcagtgtggcattagtgtcctggtcaatattcggatagatatgaataaaatatttaaatggtattgtaaatagttttcaggacatatgctatagcttatttttattatcttttgaaattgctcttaatacatcaaatcctgatgtattcaatttatcagatataaattattctaaatgaagcccagttaaatgtttttgtcttgtcagttatatgttaagtttctgatctctttgtctatgacgtttactaatctgcatttttactgttatgaattattttagacagcagtggtttcaagctttttgccactaaaaataccttttattttctcctcccccagaaaagtctataccttgaagtatctatccaccaaactgtacttctattaagaaatagttattgtgttttcttaatgttttgttattcaaagacatatcaatgaaagctgctgagcagcatgaataacaattatatccacacagatttgatatattttgtgcagccttaacttgatagtataaaatgtcattgctttttaaataatagttagtcaatggacttctatcatagctttcctaaactaggttaagatccagagctttggggtcataatatattacatacaattaagttatctttttctaagggctttaaaattcatgagaataaccaaaaaaggtatgtggagagttaatacaaacataccatattcttgttgaaacagagatgtggctctgcttgttctccataaggtagaaatactttccagaatttgcctaaactagtaagccctgaatttgctatgattagggataggaagagattttcacatggcagactttagaattcttcactttagccagtaaagtatctccttttgatcttagtattctgtgtattttaacttttctgagttgtgcatgtttataagaaaaatcagcacaaagggtttaagttaaagcctttttactgaaatttgaaagaaacagaagaaaatatcaaagttctttgtattttgagaggattaaatatgatttacaaaagttacatggagggctctctaaaacattaaattaattattttttgttgaaaagtcttactttaggcatcattttattcctcagcaactagctgtgaagcctttactgtgctgtatgccagtcactctgctagattgtggagattaccagtgttcccgtcttctccgagcttagagttggatggggaataaagacaggtaaacagatagctacaatattgtactgtgaatgcttatgctggaggaagtacagggaactattggagcacctaagaggagcacctaccttgaatttaggggttagcagaggcatcctgaaaaaagtcaaagctaagccacaatctataagcagtttaggaattagcagaacgtgcgtggtgaggagatgccaaaggcaagaagagaagagtattccaaacaggagggattccaaagagagaagagtatcccaaacaacatttgcacaaacctgatggggagagagaatgtggggtggggatggatgatgagactgaagaagaaagccaggtctagataatcagtggccttgtacaccatgttaaagagtgtagacttgattctgttgtaaacaggaaagcagcacaattcatatgaatattttagaagactcccactggaatatggagaataaagttggagatgactaatcctggaagcagggagaacatttttgaggaagttgcactattttggtgaaaatgatgatcataaacatgaagaattgtaggtgatcatgacctcctctctaattttccagaagggttttggaagatataacataggaacattgacaggactgacgaaaggagatgaaatacaccatataaattgtcaaacacaaggccagatgtctaattattttgcttatgtgttgaaattacaaatttttcatcaggaaaccaaaaactacaaaacttagttttcccaagtcccagaattctatctgtccaaacaatctgtaccactccacctatatccctacctttgcatgtctgtccaacctcaaagtccaggtctatacacacgggtaagactagagcagttcaagtttcagaaaatgagaaagaggaactgagttgtgctgaacccatacaaaataaacacattctttgtatagattcttggaacctcgagaggaattcacctaactcataggtatttgatggtatgaatccatggctgggctcggcttttaaaaagccttatctgggattccttctatggaaccaagttccatcaaagcccatttaaaagcctacattaaaaacaaaattcttgctgcattgtatacaaataatgatgtcatgatcaaataatcagatgccattatcaagtggaattacaaaatggtatacccactccaaaaaaaaaaaaaaagctaaattctcagtagaacattgtgacttcatgagccctccacagccttggagctgaggagggagcactggtgagcagtaggttgaagagaaaacttggcgcttaataatctatccatgttttttcatctaaaagagccttctttttggattaccttattcaatttccatcaaggaaattgttagttccactaaccagacagcagctgggaaggcagaagcttactgtatgtacatggtagctgtgggaaggaggtttctttctccaggtcctcactggccatacaccagtcccttgttagttatgcctggtcatagacccccgttgctatcatctcatatttaagtctttggcttgtgaatttatctattctttcagcttcagcactgcagagtgctgggactttgctaacttccatttcttgctggcttagcacattcctcataggcccagctcttttctcatctggccctgctgtggagtcaccttgccccttcaggagagccatggcttaccactgcctgctaagcctccactcagctgccaccacactaaatccaagcttctctaagatgttgcagactttacaggcaagcataaaaggcttgatcttcctggacttccctttacttgtctgaatctcacctccttcaactttcagtctcagaatgtaggcatttgtcctctttgccctacatcttccttcttctgaatcatgaaagcctctcacttcctcttgctatgtgctggaggcttctgtcaggttttagaatgagttctcatctagtcctagtagcttttgatgcttaagtccaccttttaaggatacctttgagatttagaccatgtttttcgcttgagaaagccctaatctccagacttgcctttctgtggatttcaaagaccaactgaggaagtcaaaagctgaatgttgactttctttgaacatttccgctataacaattccaattctcctcagagcaatatgcctgcctccaactgaccaggagaaaggtccagtgccaaagagaaaaacacaaagattaattatttcagttgagcacatactttcaaagtggtttgggtattcatatgaggttttctgtcaagagggtgagactcttcatctatccatgtgtgcctgacagttctcctggcactggctggtaacagatgcaaaactgtaaaaattaagtgatcatgtattttaacgatatcatcacatacttattttctatgtaatgttttaaatttcccctaacatactttgactgttttgcacatggtagatattcacatttttttgtgttgaagttgatgcaatcttcaaagttatctaccccgttgcttattagtaaaactagtgttaatacttggcaagagatgcagggaatctttctcatgactcacgccctatttagttattaatgctactaccctattttgagtaagtagtaggtccctaagtacattgtccagagttatacttttaaagatatttagccccatatacttcttgaatctaaagtcatacaccttgctcctcatttctgagtgggaaagacatttgagagtatgttgacaattgttctgaaggtttttgccaagaaggtgaaactgtcctttcatctgtgtatgcctggggctgggtccctggcagtgatggggtgacaatgcaaagctgtaaaaactaggtgctagtgggcacctaatatcatcatcatatacttattttcaagctaatatgcaaaatcccatctctgtttttaaactaagtgtagatttcagagaaaatattttgtggttcacataagaaaacagtctactcagcttgacaagtgttttatgttaaattggctggtggtttgaaatgaatcatcttcacataatgttttctttaaaaatattgtgaatttaactctaattcttgttattctgtgtgataataaagaataaactaatttcta

SEQ ID NO: 39 - protein, 933 aa, Homo sapiens
MTELKAKGPRAPHVAGGPPSPEVGSPLLCRPAAGPFPGSQTSDTLPEVSAIPISLDGLLFPRPCQGQDPSDEKTQDQQSLSDVEGAYSRAEATRGAGGSSSSPPEKDSGLLDSVLDTLLAPSGPGQSQPSPPACEVTSSWCLFGPELPEDPPAAPATQRVLSPLMSRSGCKVGDSSGTAAAHKVLPRGLSPARQLLLPASESPHWSGAPVKPSPQAAAVEVEEEDGSESEESAGPLLKGKPRALGGAAAGGGAAAVPPGAAAGGVALVPKEDSRFSAPRVALVEQDAPMAPGRSPLATTVMDFIHVPILPLNHALLAARTRQLLEDESYDGGAGAASAFAPPRSSPCASSTPVAVGDFPDCAYPPDAEPKDDAYPLYSDFQPPALKIKEEEEGAEASARSPRSYLVAGANPAAFPDFPLGPPPPLPPRATPSRPGEAAVTAAPASASVSSASSSGSTLECILYKAEGAPPQQGPFAPPPCKAPGASGCLLPRDGLPSTSASAAAAGAAPALYPALGLNGLPQLGYQAAVLKEGLPQVYPPYLNYLRPDSEASQSPQYSFESLPQKICLICGDEASGCHYGVLTCGSCKVFFKRAMEGQHNYLCAGRNDCIVDKIRRKNCPACRLRKCCQAGMVLGGRKFKKFNKVRVVRALDAVALPQPVGVPNESQALSQRFTFSPGQDIQLIPPLINLLMSIEPDVIYAGHDNTKPDTSSSLLTSLNQLGERQLLSVVKWSKSLPGFRNLHIDDQITLIQYSWMSLMVFGLGWRSYKHVSGQMLYFAPDLILNEQRMKESSFYSLCLTMWQIPQEFVKLQVSQEEFLCMKVLLLLNTIPLEGLRSQTQFEEMRSSYIRELIKAIGLRQKGVVSSSQRFYQLTKLLDNLHDLVKQLHLYCLNTFIQSRALSVEFPEMMSEVIAAQLPKILAGMVKPLLFHKK

SEQ ID NO: 40 - DNA, 6455 bp, Homo sapiens
gagttgtgcctggagtgatgtttaagccaatgtcagggcaaggcaacagtccctggccgtcctccagcacctttgtaatgcatatgagctcgggagaccagtacttaaagttggaggcccgggagcccaggagctggcggagggcgttcgtcctgggactgcacttgctcccgtcgggtcgcccggcttcaccggacccgcaggctcccggggcagggccggggccagagctcgcgtgtcggcgggacatgcgctgcgtcgcctctaacctcgggctgtgctctttttccaggtggcccgccggtttctgagccttctgccctgcggggacacggtctgcaccctgcccgcggccacggaccatgaccatgaccctccacaccaaagcatctgggatggccctactgcatcagatccaagggaacgagctggagcccctgaaccgtccgcagctcaagatccccctggagcggcccctgggcgaggtgtacctggacagcagcaagcccgccgtgtacaactaccccgagggcgccgcctacgagttcaacgccgcggccgccgccaacgcgcaggtctacggtcagaccggcctcccctacggccccgggtctgaggctgcggcgttcggctccaacggcctggggggtttccccccactcaacagcgtgtctccgagcccgctgatgctactgcacccgccgccgcagctgtcgcctttcctgcagccccacggccagcaggtgccctactacctggagaacgagcccagcggctacacggtgcgcgaggccggcccgccggcattctacaggccaaattcagataatcgacgccagggtggcagagaaagattggccagtaccaatgacaagggaagtatggctatggaatctgccaaggagactcgctactgtgcagtgtgcaatgactatgcttcaggctaccattatggagtctggtcctgtgagggctgcaaggccttcttcaagagaagtattcaaggacataacgactatatgtgtccagccaccaaccagtgcaccattgataaaaacaggaggaagagctgccaggcctgccggctccgtaaatgctacgaagtgggaatgatgaaaggtgggatacgaaaagaccgaagaggagggagaatgttgaaacacaagcgccagagagatgatggggagggcaggggtgaagtggggtctgctggagacatgagagctgccaacctttggccaagcccgctcatgatcaaacgctctaagaagaacagcctggccttgtccctgacggccgaccagatggtcagtgccttgttggatgctgagcccccgatactctattccgagtatgatcctaccagacccttcagtgaagcttcgatgatgggcttactgaccaacctggcagacagggagctggttcacatgatcaactgggcgaagagggtgccaggctttgtggatttgaccctccatgatcaggtccaccttctagaatgtgcctggctagagatcctgatgattggtctcgtctggcgctccatggagcacccagggaagctactgtttgctcctaacttgctcttggacaggaaccagggaaaatgtgtagagggcatggtggagatcttcgacatgctgctggctacatcatctcggttccgcatgatgaatctgcagggagaggagtttgtgtgcctcaaatctattattttgcttaattctggagtgtacacatttctgtccagcaccctgaagtctctggaagagaaggaccatatccaccgagtcctggacaagatcacagacactttgatccacctgatggccaaggcaggcctgaccctgcagcagcagcaccagcggctggcccagctcctcctcatcctctcccacatcaggcacatgagtaacaaaggcatggagcatctgtacagcatgaagtgcaagaacgtggtgcccctctatgacctgctgctggagatgctggacgcccaccgcctacatgcgcccactagccgtggaggggcatccgtggaggagacggaccaaagccacttggccactgcgggctctacttcatcgcattccttgcaaaagtattacatcacgggggaggcagagggtttccctgccacggtctgagagctccctggctcccacacggttcagataatccctgctgcattttaccctcatcatgcaccactttagccaaattctgtctcctgcatacactccggcatgcatccaacaccaatggctttctagatgagtggccattcatttgcttgctcagttcttagtggcacatcttctgtcttctgttgggaacagccaaagggattccaaggctaaatctttgtaacagctctctttcccccttgctatgttactaagcgtgaggattcccgtagctcttcacagctgaactcagtctatgggttggggctcagataactctgtgcatttaagctacttgtagagacccaggcctggagagtagacattttgcctctgataagcactttttaaatggctctaagaataagccacagcaaagaatttaaagtggctcctttaattggtgacttggagaaagctaggtcaagggtttattatagcaccctcttgtattcctatggcaatgcatccttttatgaaagtggtacaccttaaagcttttatatgactgtagcagagtatctggtgattgtcaattcattccccctataggaatacaaggggcacacagggaaggcagatcccctagttggcaagactattttaacttgatacactgcagattcagatgtgctgaaagctctgcctctggctttccggtcatgggttccagttaattcatgcctcccatggacctatggagagcagcaagttgatcttagttaagtctccctatatgagggataagttcctgatttttgtttttatttttgtgttacaaaagaaagccctccctccctgaacttgcagtaaggtcagcttcaggacctgttccagtgggcactgtacttggatcttcccggcgtgtgtgtgccttacacaggggtgaactgttcactgtggtgatgcatgatgagggtaaatggtagttgaaaggagcaggggccctggtgttgcatttagccctggggcatggagctgaacagtacttgtgcaggattgttgtggctactagagaacaagagggaaagtagggcagaaactggatacagttctgaggcacagccagacttgctcagggtggccctgccacaggctgcagctacctaggaacattccttgcagaccccgcattgccctttgggggtgccctgggatccctggggtagtccagctcttcttcatttcccagcgtggccctggttggaagaagcagctgtcacagctgctgtagacagctgtgttcctacaattggcccagcaccctggggcacgggagaagggtggggaccgttgctgtcactactcaggctgactggggcctggtcagattacgtatgcccttggtggtttagagataatccaaaatcagggtttggtttggggaagaaaatcctcccccttcctcccccgccccgttccctaccgcctccactcctgccagctcatttccttcaatttcctttgacctataggctaaaaaagaaaggctcattccagccacagggcagccttccctgggcctttgcttctctagcacaattatgggttacttcctttttcttaacaaaaaagaatgtttgatttcctctgggtgaccttattgtctgtaattgaaaccctattgagaggtgatgtctgtgttagccaatgacccaggtgagctgctcgggcttctcttggtatgtcttgtttggaaaagtggatttcattcatttctgattgtccagttaagtgatcaccaaaggactgagaatctgggagggcaaaaaaaaaaaaaaagtttttatgtgcacttaaatttggggacaattttatgtatctgtgttaaggatatgtttaagaacataattcttttgttgctgtttgtttaagaagcaccttagtttgtttaagaagcaccttatatagtataatatatatttttttgaaattacattgcttgtttatcagacaattgaatgtagtaattctgttctggatttaatttgactgggttaacatgcaaaaaccaaggaaaaatatttagtttttttttttttttttgtatacttttcaagctaccttgtcatgtatacagtcatttatgcctaaagcctggtgattattcatttaaatgaagatcacatttcatatcaacttttgtatccacagtagacaaaatagcactaatccagatgcctattgttggatactgaatgacagacaatcttatgtagcaaagattatgcctgaaaaggaaaattattcagggcagctaattttgcttttaccaaaatatcagtagtaatatttttggacagtagctaatgggtcagtgggttctttttaatgtttatacttagattttcttttaaaaaaattaaaataaaacaaaaaaaaatttctaggactagacgatgtaataccagctaaagccaaacaattatacagtggaaggttttacattattcatccaatgtgtttctattcatgttaagatactactacatttgaagtgggcagagaacatcagatgattgaaatgttcgcccaggggtctccagcaactttggaaatctctttgtatttttacttgaagtgccactaatggacagcagatattttctggctgatgttggtattgggtgtaggaacatgatttaaaaaaaaactcttgcctctgctttcccccactctgaggcaagttaaaatgtaaaagatgtgatttatctggggggctcaggtatggtggggaagtggattcaggaatctggggaatggcaaatatattaagaagagtattgaaagtatttggaggaaaatggttaattctgggtgtgcaccagggttcagtagagtccacttctgccctggagaccacaaatcaactagctccatttacagccatttctaaaatggcagcttcagttctagagaagaaagaacaacatcagcagtaaagtccatggaatagctagtggtctgtgtttcttttcgccattgcctagcttgccgtaatgattctataatgccatcatgcagcaattatgagaggctaggtcatccaaagagaagaccctatcaatgtaggttgcaaaatctaacccctaaggaagtgcagtctttgatttgatttccctagtaaccttgcagatatgtttaaccaagccatagcccatgccttttgagggctgaacaaataagggacttactgataatttacttttgatcacattaaggtgttctcaccttgaaatcttatacactgaaatggccattgatttaggccactggcttagagtactccttcccctgcatgacactgattacaaatactttcctattcatactttccaattatgagatggactgtgggtactgggagtgatcactaacaccatagtaatgtctaatattcacaggcagatctgcttggggaagctagttatgtgaaaggcaaatagagtcatacagtagctcaaaaggcaaccataattctctttggtgcaggtcttgggagcgtgatctagattacactgcaccattcccaagttaatcccctgaaaacttactctcaactggagcaaatgaactttggtcccaaatatccatcttttcagtagcgttaattatgctctgtttccaactgcatttcctttccaattgaattaaagtgtggcctcgtttttagtcatttaaaattgttttctaagtaattgctgcctctattatggcacttcaattttgcactgtcttttgagattcaagaaaaatttctattcttttttttgcatccaattgtgcctgaacttttaaaatatgtaaatgctgccatgttccaaacccatcgtcagtgtgtgtgtttagagctgtgcaccctagaaacaacatattgtcccatgagcaggtgcctgagacacagacccctttgcattcacagagaggtcattggttatagagacttgaattaataagtgacattatgccagtttctgttctctcacaggtgataaacaatgctttttgtgcactacatactcttcagtgtagagctcttgttttatgggaaaaggctcaaatgccaaattgtgtttgatggattaatatgcccttttgccgatgcatactattactgatgtgactcggttttgtcgcagctttgctttgtttaatgaaacacacttgtaaacctcttttgcactttgaaaaagaatccagcgggatgctcgagcacctgtaaacaattttctcaacctatttgatgttcaaataaagaattaaact

SEQ ID NO: 41 - DNA, 412779 bp, Homo sapiens
atggtcataacagcctcctgtctaccgactcagaacggattttaccaaaactgaaaatgcaggctccatgctcagaagctctttaacaggctcgaaaggtccatgctcctttctcctgcccattctatagcataagaagacagtctctgagtgataatcttctcttcaagtaggtactcctatttcttctcaatttattttttcctttttgatataatgtgctactgtttacaagcatattgtaacttcagagcttacctctcatctttaaaaaatgttcatttttttgtctttctgctccaaggatattttgcaaagttactggcaagtattcctgggatgataaaatgtgaaatctaaacttggtacagtggaaattcacttctagaataatatttagctgaggcagagggcaatccgactacccttttcttagtacagcacacacaggctgcctgtctgttccagataacataaatgtattggatctagcactagctaggagacactgtattgttgaactgtgttagaattttataagctcttaattggacaaatctcagagtagcatgaacacactacctgttttctgaatctttggagccataacttacgtgagtttgaactaagcgatgtgaataagccattatttgtttcctaaaggcagtcaagttttctgaaaagctacacatttagcagcaaaagaacgagcccctctgtcttgaaatgggcctctgattttaagcaagctcttttgagtcctggtgtcccattttctcagttcctttttgcctcacaatggcacatacataatgactccaccacatatagcagtgggctactcgggtaatgatgtggcagtcacaagacagggcagaatactttcattttggttagaggaatgccacatgtcttaggaaatgctcgctgaactgtaagtttcatactttgtcaagaagataaccagtattctctcaaacaagtccgtaggagccaacatgattaaaagattttaaagcaatttactcgatagaagggttgggcttaatcaggacttgtgatcatggcaatggttcctgcttaaaggtgccagatttttaatgcctttatgtgccagatctaataggcttacagagcaactccatgtatatgaggttgctgggaaactcatctggttttgaatgtggtatatacatattttaatattgagagtaaacaggaagaccaggtagaagtatttgaactgaattctgaaacgtacagagaacttaaattggatgagaatgtttgagaaccatggatggttcagggtccatttgtataccataaaatcccttcctatttctcaaaagcaaatattttctttgattttgttaatatcctgtgatgactgcccactaggccttggaatgcatgcagataatgctgtagcagttggataaaatactctagaatgtcagattttcaaggaaattacaaataaaaacaatgtaggtaaaagatacgacatgtaggaaaaaagcaaaattttccttaagaatacaagcgtcgtatttacgagtagaagatttttcttggacatttggagatacgtgtttcattttattgcttgtgacagtcaaggaaaggaataaagctcttgtgtcttaaacttgcagcaagaacaaagtccaactatctttcgtttctgataactctgtgtctttttgttcaatattgggtttagagctagctaccatctaccttcccttcaaacactcactctaaacctccacacagtgtaagtatttacatcaggcatctgctaaacattttcacatggttatctgcaggtcttctctgagtctgtctgcattcatttatcctagttgctcagaacaatcgcttgggctgacggcctggtggttgagtttactttgctttgaatagggaacagctgtgctccaggactgcagattggctattcggaaaaaagggcaaggaagagagtgacccagctctgggtagaccatccacactgtaaaaaaaaaagtcatagcatagtcttcatctatggcagtggagatatggtcctgtccatccacctctatcaggagagggtctccattgttaatctccgagaaagaggcgccatctgtgaaacctcctgcatattgtctaatgaagtgctattttgaaaggcgtgcactgtacaggtaagagtgatgatggtgtgcctgccttctgggcaacatctcagtagacttcctctgaatcattcccactggacccaacagcaaaagcgtacacatcattgagttttatcgttctatctaaggcgtataacatttttctctctgaaagtctgtgattctttcggagaatgaaggggcttaccctatccatctgcccctaaaaatattcgctggaaagctgatacctctgctcaggttttccacagcagatcactcttcagtaagaattctgatattaagtagtttaattcagatccatggaaaatgactgagtaccagccatagctcccaccactctctagctgtgcaatttagaggcagattatttaacctcatgccttgaatttctcatctgcaaagtgggagtactaacagtagctaccagatatattatatggaataaatgacattaagccactcattaaactccttgcagtttccaagcattagaaactcagtatgaggaagttatttctattctaagcctagcacagtgcctggtactcaatacatgttggttgaatcagtgaaataattcaaggtcagcaccaaagctgctaggaatttatgaacatctgatcataactggaaacttgatctaaaaagcaaagggcagtcaatccaatcaactgagcgtaccatctgttgaaatgctgctgcttctgtaatgagtataaagtgttggaagagaaagtccaggaacctccatcattcttccatcattcctctcctttgtgactatctttgtgatgagaagggtaacaaaaaaatcttgctgagatgagcgtgtcaaaaacgtgttacaaatgcttcacattccctttcacatcaacagaagcatgttgcttcattgttgggcaatgtcttagtccatacacacatagagctctatgctgatttttttttgagatggagtctcgctctttcaccgaggctggagtgcagtggtgctttctcagctcactgcaacctccgcctcccaggttcaagcaattctcctgcctcagcctccagagtagctgggattacaggcatgtgccaccatggccagctaattttcatatttttagtagagacggggttttaccatgttggccaggctggtctcaaactcctgaccttaagtgatccactcgccttggcctcccaaactgctgggattacagacgtcagccagcatacccggttgtatgctgatgttctaattcaatgtgataccaaagacctgagatagtctctcccactctggccccataacatatgtccacgaggtggtaataataacaactatagtagcacctaaggttggggcagctcttactttgtgcgatgctttttatagtgttattacgtgtgattctcacagcaaccccaggtggtgaacaacgttatgattcctgttgtacaaatgaggaaactaaggctttgcaaagctaggtaacatgcccaatattacacagcttcaaaagtgacagccctaggacttgaagataaactcatctaattccaaagctcatgcttttagccattacttgagacagtattaacttttaaagtttgtaatcaatatgaatttggccttgggaaagcaggttaagcatctggggttgatgggagataacattacaccctctcttagcctcagcaacttcatctgtaaaatgggaataattacatccgagtcacagaagttttgtggctcttcatgaggattaaataaagtaatgcatgtaaaagagttttgtacaaagttcacttttataaaatgcaagttgtggccgggattggtggttcacgcctataatcccagcactttggggggctgaggtgggtggatcacctgaggtcaagagttcgtgaccagcctggccaacacggtgaaacccgtctccactaaaaatacaaaaattagccaggagtggtggcatgggcctgtaatctcagctacttgggaggctgagactggagaatcgcttgaacccgcgaagtggaggttgcagtgagccgagattgtgccattgaactcccacctgggcaacagagtgaaactgcatctaaaaaaagacaaaaaaaaaaaaagtaagttgttatatgcaatgcataaattattacttagttccatgtaaaatcttcccactaagtgaatgagggttcacctggctgtagtgctatgagatagatatgaggggcagattggtttatgcttctcaaaaacagaaagtgtgccagggtggaagtgtgggtggggagtctccgcctcccagccatgtggcaaagctggaatgtgagtacagcagcagtatggatgcggttttgaggggatggtggtaatcctcttctggcggcacccctccagtattgtgggatgctctctgatttcttttgagaagacaagtagctaggagcttccctagcctttctgttgtaaaaaccatcaagatccctgttgaatgcatacctggagcttggtttccctaagcacagactttaataacttcatttggatttagtctcctatttaaagctgccacccactctcaattttttgggttttcctactaagaatggatataacatgggcagtcttccagttctcctttcttgctgccttgaagacaacacacaggccaatcacaaggaggcagagacaggccccaacaagttgacaatcctagagagcttagtgtgagtagacttgctgaggttcctgacttttgctggaataggagagtgccactggctttttgacatttctttttccaactgtttccttgtcaaaatgaccagcagctcagctcccctaaacatacctcctcccctagattggttcagaggaagccatcaaggtccttttgcaaacggatgatctgcatttttgagatccttctttcctctgctgttcatagaaatggtctcattggaataattccttttggaacgttactaaggacaccaagaaatcaacaagaaaatttgagtgtatctgacagaagaaatttggcttttgtactctaataattatttattagaagcaataactggtcagaatttatttgcttaaaaccatgtaaagaaaggtgcttaataaagataattgcatcacatatagtaatccgttttagtatctttcaccttaaaactatgtgacaaataaagacacaaattgctctttctttctaataagcaattttggaaattccttattgggaaattccaaattttacaaaatttacaaaatttaaaattttggaaatcgtacctgcatcaagttttctgaaagaatatttaaggattaaggttacttagaatccaatatatgcatagtttaatttaactcatattgttaaattctttttctaattttatttaagaaatgagtaatattgacaagggccttgctgtggtttattatggcttgtcctagagtctctattcccagctagattaaaagtgcctcagggctgggcatggtggctcatgtctgtaatcccaatattttgggaggctgaggccagtgaatcagttgaggccaggagtttgagaccagcctggccaacatagtgaaatgctatctctactaaaaatacaaaaaattagccggacatggtggtgcatgcctgtaataccagctacttgggaggctgaggcaggagattcgcttgaacctgggaggcggaggttgcagtgagctgagataacaccactgcactccagcctgggagacatagagagactccatctcaaataaataaataaataaataaataaataaataaataaataaataaataagtagtgcctcgggtgcatagatggggttgttcagttttctaccctgtgccttgggaagtgcctggtacacactggtgtttggcacataattgtagagtgagattgagcctggcatgttccttgatccctagacaatctctatcaggtgtgatcagtaaggcacataatatgatatgtgactattacagagtagcacactacaatatgtgcctaaagccataacatcaactaatacaattcagcagagtagaatgtgaagagtgcttgcagagtgctgagcaccacggtgaggaagtgtaaacagaagaaggtatttctgggttggtgcaggatggttagggatagctttgggtaggaagcgactcttgaccatgaccttaaaggacaggtaatgtttacatgggaaaatacaaggaaaaggaggtgcataatgaaaggcatgggggaggtggttttgggaaaccatcagtctgacagaaacatagttaagaaaagtgcaaggtggtggtaggaggtaatttagaagtggagagtcagatgtcctattaaggagcttgaactttatcttgtaggcattaaagatgttggtgtaggattggaatgaaataaagacttaaccttagaaaaatactgtgtggattgaagttttcagatgaagagtgggtacatcaattcggaggtgagggaaatagttcaagggaggtgtcacaccattaaaaaaaatcttttaggacttgttttttgcaatcatgattgtttatggttgtaaagattttgtttcagaaatgattggtggagaaagaagtgtattgagaatcaaaagatgggactgtgccactgatgtgcgcagtgagaagctgcaagcttggtgccccatcttcctaactgtaaaatgggcataacaactaccagacagccgtcaaaacattatactagtgatacaatgaagactaagtgatataattttgaaaggcagtatgccttatatgtgtaaaatgctgtttacttggaatatttttatagtaaaattattttctttggacaagatatagatgcagaagaaaatgatcatatttctgtgagattaggattcagaccatttgaattttttatatttattaaataggtactttatgttgggtactgaataagtcttttatttttaacacctcatttccctcacaaaatggatggcatctttggactaggggaaatgtgtggtccctgcagctgtagtattttatgattctatagcttttgcctttagcaaacttctcttagaatagtgatttaagggctgggtgtggtggcttacacctgtaatcccagcactttgggaggctgaggcaggcagatcacctgaggtcaggcattcgagaccagcctggccaacatggtgaaaccccttctttactaaaaataaaaaattagccccgtgtggcagcatgcgcctgtagtcccagctactagggaggctgaggcaagagaatcgcttgaaccgggaggtggaggttgcagtgagccaatattgtaccactgcactccagcctgggcgacagaacatttaatgctggtggctcacacctgtaatcctagcactttgggaggccgaggtgggtgaattgcttttgctcaggagtttgagagcagtctgggcaacatggcgaaaccccatctctataaaaaatacaaaaattagccaggtgtggtggtgcacgcctgtagtcccagctacttgagaggctgaggtgagaggatgacttaagcccaggagatccaggctgcagtgagctgacatagcgccactgcacactgcattccagcctgggcaacagagcaagatcttgtcttaaaaaaaaaaaaaagtgacttaagatactgacagtataaacacaaccaaacccatgggcatctgtgctgggaataaaagacagacatgttttcattgcactgatttaggattctgcttggaaaggaaaactgtgatctctcctgcagttgcctaaaatgctttacagttatgggaatggaaaagctaaattctgtgatttgtgggtagagggaaggaggacgagtgtcctttctgatttcctctttttccttctcttccaaggggaaataaaaggctagagcaacaatttaaaaagaaaaggcaaggagctactgggggtagagtcgggagggaaaaaggccaaacccactaaataatttcacttcagttacagtaaatctcaaatgatgatgctacactcctgagaatgttccatggtggaaatgcctgggctttgaattttgagcagcgaagtaccaggagagggtgacatgataacattcaacaggaagaacactgctcttgtccgtttgacggtcctattcctccggatcactcaatcttcacaaatcaagcatatagctccttcacatgtcatttgtgaagggaaagactcctaggaaaatgttttctaggaaagggaaaaaagcagaaagcaaaggtctcctgcttactacagcattcgtgttgcataagcagtattaatgtagtggagtattaatcacttagaacagttcacgtattattcctatctgggctctgcagggtcctttcttcacttctttctcgacatttggattctgtccattttactcctccctctgcacttggaatagaagtgaaatttgttgtgccaattctctgcttgttagaagccatggtaatgtttagtaggggaaaagatttgtactgctacatagaaggaggttttgggattatttaagactttactttgttgatgggattcctagaatctactattactgggtatactagacaagtttgtagatttacaaaagtgtggataacatgggttgcacttgatttctttatccagctctttggttctaaatttattgccaattttatttatcaaaactattctcagcggagtagtattttctgtggacacaaggaaacatctgtgagcttaaaccttagaggcagatagccagttagaacatttggcatatgaagcttagatagcagaagagaaaaattaaccaaggcaaccctcaaaaatattgagaaggcaactaagaaaaatttcttatcactgacagactgcagtattgagttcgtgttaatgaagaaatgtcagaatacataatgaatcaataaggagtgtcatattatggcaagtttcaatgttggtgtcaatctcgactgccaggatttatggtagattatataatggaatcctgagttctgagagatcaaaggaaaatgctggctctttcttcatccattctcttaggtcaagcctatgcagcaagaagccaagttgagaattgagcaattatctgaagtgggcagtggagacggccaaaccagataatatataaccagaaagtcaccgtggagggaaaatgtggactgaaaataggataaggggtggaggtagaatgtcaagccatttggtcagtgtccacagtccaaatttactgaataacagccaattccttacttcatgtggttatttagagcgagactagaggacaagtgaaaaaaaaaaaaaagagttcattcctaaggttgttgcatgtttgtgcaaaatttcttcaaatctctgttattatctgttacatgtctaattctgagtacttccagagattgcatttcattactttagattagtgggttgaagtggtggaggaagcccatataatctgacttacatggagaaaacaagtctttttttatagtttagttgagtgttatatttaattagcctttttttccctccataatgcatgcttatgaattttccacttaaaattctgaggctctgacctttatcatttcctcatggagcaatttctgtacctccttaactttagtagaacatagcaatgaaatatacaagtcccctagaatagaatttgtgtgaatttggttttctaaaaacacaactaccaaagtctgaggaccagtgtggtatttttttcttctatttgatatggaaaccataaactacttactttgagcagatgtttcccagtcctaaaatacagctatcagtccactggcccctataaatctgttggagtgcacctgctaattctgaagcctccctaatacaatgttaaactttccttttttttttttttttttttttgagaaaaaaattgtaaattaggttcactgttgcttggaattaggaaaaaataaaaacacaggcatactaatatttcagatggaaaaacaaagttaagaattcaacaagtttttttcccccactctatcatgtcttgcacatttaaagctgttatacaacattttaaaaacaaaccaaaaaaacccagggcctttttccaacagcttaggctgatgacccacagtaaaaaagtgccccatgggatattcttaaagcaccccaagggagtctattgaaataacttaaagtaaaaattcagaagaattttacatgtaattaaaaattaagaacgttgttttataagcaatagggaaaagctgtattaagttgcattgctcaatttctcacttgctctgtgcagtgactgctttttcaaccatgtaacaacgtctgaatcttcgtggtaaaatcatacctatcacagccacagcaggttttgttctgctgctgcacatgtgatttgagatactgtgggctgggagtttttttttttttaatttctaatggcaaaatggatctatagaaatggaagtcatctgtaatctcagcactttgagaggctgaggtgggtggatcaccggaggtcaggaattggagaccagcccagccaacatggtgaaacccatctctactaaaaagataaaaaattagctggcgggcgtggtggtgtgcgcctgtagtcccagctacttgggaggctgaggcagaagaaatgcttgaacccaggaggtggaggttgcagtgagccgagaccgcaccgttgcactccaatctgggtggcaagagcgacactacatctcaaaaaaaaaaaaaaaaaaaaaaagaagaagaagaaatggaagtcatcccgtgggcctgagttggtgtagtggattatggcctgtgcgtgaatgaagaaatacttgccaatggcatcagtggtaactagcttaagccctactcagctttgtaaaataatgtaatcaaggaatttgatctgaacaggtaagccaaacattgattcttcagtgcctattgataagtgagactacttttctttttaacagccttatttcacttaagtggggagtcaaactagctttaattaaggaaatctgtagaaatcacccacatctccctttccttctctgttaaaaaaacaaaaggaagaagaaaactaggaaggagtaagcacaaagatctcttcacattctccgggactgcggtaccaaatatcagcacagcacttcttgaaaaaggatgtagattttaatctgaactttgaaccatcactgaggtatgtgtgaacatactagtttcctctttctctctcctgactttgtccgtgaattgataagatctaatttggtcatcagtttggagaacgatttttcatttaatttctttcattatcaagtgtgtattgtcaggggcttagcagtacacctactatctgatgggcactctacatgcgttgcttaggttgaaattaaggatacaatctgtgcactaccaccatttaaaaaaatccccaagtctactgtgtgggtgaggtttctttgcatagtatcagagaggttaaccaatttatttacatactcaatagtccactctaagtagggaaaatccaagctttttttttcttaagaaagagcttttcattcttttttccctcagagctttaccatagtttccagcaagtgaaaacatttcttgatttgaatttcacaacctccttctcctcttgccagttgtatggtgctaataggaagcaaaatgtgagtgtgcttttaatttaaccctaaaataggggaatatcttcagaatttagactttacatattcagtgacctacctaaaaatagagacatagttctaaccttctcaatcattaagaaacatttctattgaatttaattattcaaaacaacaggtagcagtttcacaagggaaaagacaagccatgccacttgtatttgtggtcaccaagtaattacattattttttatttaaaattaagataaaataacttactgactgtcaagtccatttctcatttcctccatagaacattttaaaactagttcacaaacctcttgaaaagtcatgcctctagaaagtgcaaattgtcaccattgcctagaagccaacttgagaggctgtgtatctatgcagcattttgcaaatccagtagcaggcatgtgatataaaagattaaatgcacccctgatttgtgaatactatcctagccttcaaaatgttcaaaagcacaggaagtctgcacttttaaaaatataacctgcccaaattgcaagggaggggttgggtgtaggacctaggtctgtctgccaatcagcttgagatgccagtggacgaaacctgacttcactaaaaaccagactggcaaatattactcagcgtggtaatttcctaattgtagaactggcctgtttggtgaagtatttcaggaaaatttttagctggaccttttctaccctactgcataagaaatgaaggtttctaggcaaagactttacttagtgactaaccaaaaatggtaaataaagtcaccacttccaggcttagctactgtcctcaaaacagctgcaggactggtcaggccagtcttctgaggctggaggtgcatgtggaacccccagagccttgtctgcaagggcatggctgactgcaggctgtttagaagcaccccgccccgtgaaactcctctggcttaggaattttaaacagttctagttctaatctctctgctcagagtctgagcagctgtgaatgagctctcctgtgaatcacagaaatgttaatgggtgagctgctctagcttcttacttccaagtggaaggcgcctgtagctctttgccagcttgatgcagtgagtttgattcctcttttgggcagcagggagagataatgaaggagggggaaaaaagattttaatatagaaacgagtcttccatctggctgaggctgaacaaagtagaagaaccagtgcaagtcactgggggtatggatctcataccattttcagcatatacctccctttctctctttttgattctacacatgtcagtccctgagtagtcttgcattgctttccccactttgaagtcttagatccaaaactttgattccagaaaggtctaaggtgctgttgctgagattttgaaagagacctgagacaaactgttgggattctagacgctattgcgcatctgcctgggtaactgtgtcacttaggttgggtcaccagaataattctcctccatttttgctgcctttccaatttataaacaacacagaacatcagtggttctcccataatcaaatatatttggctctattaatattaaaatttgatcttgagtagaaagattctaagggctaaaaaataaaagatgtaaaatgtatgttgataggttagtgtagaagccacccatggggttgcccccactcccactctttcatattttttttaagaaacaacactcaagttacaaagtcgattctttttttgttttgttttatttgagactgagtctcactctgtcaccacccaggctggagtgcagtggtgcgatcttggctcactgcaacctctgcctccccggttcaagcgatttttcctgcctcagcctcccaagtagctgggattacaggtgcccgccaccacacccagctaatttttgtatttttagtagagatagagacagggtttcactatgtttcaccatgttgaccaggctggtcttgaactcctgacctcaggtgatccacccgcctcagcctcccaaagtgttgggattacaggcgtgagccaacgcccctggccacaaaagtcaattcttaacttaaaacataaaagttccatttcttttatggtctacttagtcatgtctggagtcagtgagctcagtcaagtagtttgcagaatgacagttgtgatacctattcatttacccaccagattattttctgctctccatggcactttatagaaaacagtttattcggtcattacaacagctctaggagggggtttcattaaacccactttctaggaaagcgaactaaggcttagaaaaatcaagtaatttgctaaagactacccagctggcaatgatatgacaggacatgaacttaggacaataactcaaggtcttggtccctgtaaatatgggtttccaggttatgtatgcaggcagagggcttagatcctgaagtttccttcagaaacttcaggatctaagccctctatataggagcagtataaaaaggaaggatctcttcccatagggagcttgtcatccattgaatgaggaactcagacttccactgtgaaatgatatttgtatccccattgtgtgcgagatatggggactctgatcatcataagagcacatttttcctgcctataaatgatacttaatagagctgacagattatatatatctggaacacttttacctagcagaaagacaacaggctaggattagctgactaataattttatttatcaagctcaattcccatgctgacttctcttcctctagtgaaaatgtgtcatcagatttggtcccaaactggagaggtgaaaggatcctttgaccagtataatagccatgccatcagttttgctttcctaattaagttttatatgggttaatgatctatatcattattttgggggtttctaaacacatatgaactaaagatggaaaagatgatggaaaagatggaaagaagatgactcagatgtacaaaggcttgcagagagaaggataagccaaaaaattggtaaatcacacatgaataatcaagaactgactacaatataataatatgtgtccatttccactaatgaataagctgccattatgtctcttcattctctatttaggacaaattacttctctgctgtatttccattcttacaggtacctatctgctgtgatttttcccagttttgactttatcttgttgctttaatcttgtctctaagtaagctgcaacccagtaaatatattccagtattgtttattgtaattcctgcctttatgtcaggtggcaagaggaagggactggttttattaatttatcagtctgggtgtgtgctaagaggatccttagtacatgctttgattatggtagattgagtctaaaagattcagctggtttattccatttattttggtctgtctacctaacaaggtcacacagtggattatactagttttctatgtgtcatattgttggcctgacacataatagcaaataagaggtaccagaattttctgtacagtctgaagctgtgtgtgtacaacaaccagtgaaaaatcttagttatttggacttttgggttccatgatgccagagaaagccagacaccagcagctggaatcagctaagacctaagaccctgcatgcacatatagatgtttacattttcttcctattgcgacattcagccattgctttggcgcctatttcaataatatattgctgctcatcaaagtggaaataatgttttgttactagctgagtattgaaaagctcttcatagttttgtgattttgactcagctccaacatgcaggacccatttcttcaactgactttggcaacaggagagattgactagtgggcttgaaagtgatccactgctgtttctgtttaactttcttcaatcctactgggtcttgggaagaagaggtagcgggcatccttgtttgcctcaaccaggaagcacaaggccatcccagggcggggcaggagagaggtgggagggaagaagcaggctccacagggccattgtttaccttgttggcgggtcaggtcttctcagggtagggttcctgggataagagcaaagcttattggttttccttgctgtgccacgagagcacaccagatcacccctgcagccttgcttgccttcccacagcctgcccttgcctagggtttcagctgatatcctttctactcaggaggagaaaccacagaacacatggaggaagtgtttccagtgttaagactttagaccaaactatagaaatctgttctacctggaaacctgaagaaataaatcatgactgctattcagtagaagtaaaataaaaaaacagctttactggtttggaatcataggaaggctttctgtatagcctctctgagagctgcctattggaaggatttgtcctcaaaacgtgaggatttgtggtgttccagggtttatatgacactggcaggatagtttgctagagggctgtgcttcgacctttatccaagggatgtaagccgtgtgtttaggttagtgagcgtctagcacaaagctctaatgttgaaggagcattggaggcaggctgtgcctctgaacatgtagaattgactagaaatgccaatgttcatttcaaaatgaaatcattatctttcttatgcttccatttaaaaatgattattacatttttgcatatggttgaatgcatattaattttagcaagtttagaaaagagataagcataaagacatacataaaaatcacttattctcatcagctatagataatcactaacaatattttaggacattttcttttcatctttttcttagcaatatgtatgtgtgtgggtatacatatttaagtgtgtatatatgtaaattaaaaaacataaaatattcccacaatataattaataaaaatctaagatacaacacaatttccgtttgtaatatgtagtgtatatatgtatatatacacattatatgtatatataaaatacatgcataaaatagatacacaggtatatattttgcaaattgaaatgatgttgtatcttgtagattttatttaacattagaatttatttacactacttaggtgttttaacaaggattgtggtccaccatttatttccttaagagtaattccaaaaagtggaaatagaatgtcaaggggcaaagttctttataaagtccttaaggagtattgccagatatatttttttttacttccttttaaaacatgattgtattgtagaagttctctttaaaaattccaagcaaaaatttttcaaaatcccatctagaaatcaaatcatgattttatttggctatgcctcttgtagtccttgtctatgaacttattctattattaaatataataggtaatttccactaatttgacagatagaattttattttttacattttctcttgttacagtgccatgcatatttctattatgttacagagatcttgggggtcttttttcctccctttttcctttctcttttcttgttctgtaccccttcacagaaaccaacaaatacaggttgatgtgtatcctctactcttttctccatgctcacacaacccaatatttacacatgcactgatttttcagggcaatggtccttctttatcataaattgtgggataaggttatatacataatatatgtgtgtgtgtattactctgaatcttggttttgtcactttgcaatatgtcttaaagattctgataaatcttatagatctatctcattcttttcagtagttgcatgcagtataaatttactataacttattcaagtaatctgctttcagctgatactctgttgtgaacagttttcaacatataaaaaagtgctgtcattacaaatattcttagatatatattcttagtaattgggggttttattgttatggtgtaagtcccaggagtagaattgctggtttaaaaggtatgtgtatttttacatttctattggttttttcatattattttctaaaaatattatagcaaatcacagtcccactagtgatgttggagagtatcattttcctcactagtactcctatttccctgctttctaatctttcctgatctaatgagtaagcattgttaattttcttttcattttcttgacttctaatgagcttaagcatcttttcacattattgttgttcctttggattttcttatctgtcaattaccaatggatatccttgacctatttctcccttatatggttgcttttctcttattaaaaatttgtaaaagttctttgactattacagattttaaaaactggcagataaagttgtatgatttattgtgtataatatgatattttgagatatacatatatcttgatatatcaatatcgagatatatatatcacacgttgtggaatggctaaatatagctaattaacatgtgcgttacctcatgaagttatcatttttgtggtgagaacacttaaaacctctcagcatttttcaagaatataatatattgttattaactatagtcaccatgttgtacagtggatctcttgcacttacttttccgatttaactgaagttttgcatcctttgaccaatgtctttccaaccctcacctcccacccctctgcccgacactgccccagccccggtaaccaccattctactctctatgtctatgagatcaacctttttagactctacatataagtgagatcttttggtatttgtctttctgtgcctggcttatttcacttaatataatgtgctccaggttcatccgtgttgttgcaaatgacaatatttttctctttttttaaggctgaatggtattccactgtgaacatataccatattttctttatccattcatctgttgatggatacttagattgattctacatcttggctattatgaataatgctgtaataaacatgggagtgcagatatggctttgacatactgaatacattcgctttgggcatatacccagtagtgggactgctgagtcattcggtaattgtatgattactgttttccatagtggctgtactaacataccttcccactaacagtgtgcaagggttctctttactccgcatccttgccaacacttttaatcttttgtccttttcataatacccattctaacaggtgtgagatgatatctctttgtggttttaatttccattttctgatgattatagtgatgctgagcattttttctatagattttttttttttggtcagtggattgctaaatcttaccccgtcaataatttctcctttgattttacttttataattttctgctacaaaattaaaaaataattgtatgaaataaaatttttcttcctatacgtattctgaatttcctatcttacttcaaagagtcttcccacctcctattttctaaaattttcttctaaaaatttctatgttttattttattatttttaatatttagtattttttacatctggaatttttttatataaaagtggaaggctcaactgcatctctttttatataaagaacgaattgtttaaacatcacatgttaaataatcttttctccaataaattaaattatattagcatcaatttaaagattttttttctctaaaccactaatctatttatttgttgccaggcctgagacgtattgctttgattataatagctgtatagtctcttttaacatttggcaagtttgatgctccctactcattaatattatttataatgttagcctggttttcctttttttttttcagtccaaataggatttagtcagaagaaagatacgtggattacatttttaaaatactgatcaaaatgaagatgctccaaccgtataaatggcagatgaaatagactttaaagtaaaaaatatttatcacacaatatatcagaaaaatataacaaacccgaaccaacaaacatcagcaacgtagctccaaaatattagcttgaaacatgaaattgccaatagttgaccactttttgacctacaaaagcaacaatttatataaagaaaaggtcaataaaattatggtaaattgaatttttttttattattacactttaagttctgtgatacatgtgcagaacgtgcaggtttgttacacaggtatacacatgccatggtggtttgctgcacccatcaacccgtcatctacattaagtatttctcctattgctatccctcccctagccccccaccctctgacaggccccagtgtgtgatgttcccctccctgtgtccttaggttcccacttatgagtgtggcgtttggtttgatgttcctgtgttagtttgctgagaatgatgattgccagcttcatccatgtccctacaaaggacatgaactcatcctttttaatggctgcatagtattccatggtgtatatgtgccacattttcttaatccagtctatcattgatgggcatttgggttggttccaagtctttgctattgtgaataatgctgcaataaacatacatgtgcatgtgtctttatagtagaatgacttataatcctttgggtatatacccagtaatgggattgctgggtcaaacggtatttctagttctagatccttgagaaattgccacactgtcttccacaatggttgaactaatttacactcccaccaacagtgtaaaagcattcttatttctccacatcctccccagcatctgttgtttcctgactttttttttttttttgagatggagtctcactctgttgcccaggctggagtgcagtggtgcaatcttggctcactgcaagctccacctcccgggttcatgccattctcctgcttcagcctcccaagtagctgggactacaggcgcccgccatcatgcccagctaattttttgtatttttagtagagacggggtttcactgtgttagccaggatggtctcgatcttctgacctcgtgatccacctgccttggcctcccaaagtgctaggattacaggcgtgagccaccgcacctggcctgtttccagactttttaatgatcaccattctaactggtgtgagatggtatctcattgtggttttgatttgcatttctctaatgaccagtgatgatgagctttttttcatatgtttgttggccgcataaatgacttcctttgagaagtgtctgttcatatccttcacccactttttgatggggttgtttgttttcttgtatatttgtttaagttcttgtagatattagccctttgtcagatggagagattacgaaatttttcccccattctgtaggttgcctgttcatgctgatgatagtttcttttgctatgcagaagctgtttagtttaattagatcccattcgtcaattttgccttttgttgccattgcttttggtgttttagtcatgaagtctttgtccatgcctgtgtcctaaatggtattgcgttggttttcttctagggtttttatggtttcgggtcttacatttaagtttttaatcttgagttaatttttgtataaggtgtaaggaagggatccagtttcagttttctgcatatggctcgccagttttcccatcaccatttattaaatagggaatcctttccccattgcttgtttttgtcaggtttgccaaagatcagatggttgtagatgtgtggcgttatttctgaggcctctgttctgttccactggtttatatatctgttttggtaccagtaccatgctgttttggttaccgtagccttgtagtatagtttgaagttaggtagcatgatccctccagctttcttttagcataggattttcttggctatacgggcttttttttggttccatatgaaatttaaagtagttttttctaattctatgaagaaagtcaatggtagcctgatggggatagcattgaatctattaattacttttggcagtgtggccattttcatgatattgattcttcctatccaagagcatcgaatgtttttccatttctttgtgtcctctcgtttttccttgagcagtggtttgtagttctccttgaagaggtccttcacttcccttgtaagttgtcttcctacatgttttattctctttgtagcaattgtgaatggaagtgcactcatgatttggctctctgtttgttattactgtataggaattcttgtgatttttgcacattgattttgtatcctgagactttgctgaagttgcttttcagattaaggagattttgggttgagatgatggggttttctaaatatacaatcatgtcatctgcaaacagagacaatttaacttcctctcttcctatttgaataccctcaatttctttcttttgcctgattgccctggccagaacttccaatactatgttgaataggagtggtgaaagaggatatccttgtctggtgctggttttcaaagggaattcttccagcttttgcccattcagtatagtattagctgtgggcttgtcatgaatatctcttattattttgaggtatgttccatcaatgcctactttgttgagagtttttagcacgaaggggtgttgaattttattgaaggcctttttttcatctattgagataatcatgtggtttttgtcattggttctgtttatgtgatggattacatttactgatttgtgtatgttgaaccagccttgcatcccagggatgaagctgacttgattgtggtggacaagctttttgatgtgctgctgggttcagtttgccagtattttatcgaggatttttgcatcaatgttcatcagagatattggcctgaaattttctttttttgttgtgtctctgccaagttttggtatcaggatgatgctggcctcataaaatgagttagggaggagtccctctttttctattgtttggaataatttcagaaggaatggtaccagctcctctttgtacctctggtagaattcggatgtgaatccatcttgtcctgggctttttttggttggtaggctattaattcctgcctcaatttcagaacttgttattggtctgttcagggatttgacttcttcctggtttagtcttgggagggcgtatgtgtccaggaatttatccatttcttctggattttctagtttatttgcgcagaggtgtttatagtattctctgatggtagtttgtatttctgtgggattgctggtgatattccctttatcatattttagtgtgtctatttgatttttctcttttcttctttattagtctggctagcagtctatctattttgttaatcttttcaaaaaaccagctcctgtgttcattgatttttttttgaagtttattttgtgtctctgtctccttcagttctgctctgatcttagttatttcttgtcttctgctagcttttgaatgtgtttgctcttgcttctctagttcttttaattgtgatgttagggtgtcagtttgagatctttcctgctttctcttgtgggcatttagtgctataaatttccctctaaacactgctttagctgtgtcccagagattctggtatgttctgtctttgttctcattggtttcaaagaacttatttatttctgccttaattctgtcatttacacagtagtcattcaggagcaggttattcactttccatgtagttgtgcagttttgagtgagtttcttaatcctgagttctaatttgattgcagtgtggtctgagagactgttaggatttccattcttttgcatttgctgaggagtgttttacttctaattatgtggtcaattttagaataagtgtgatgtggtgctaagaagaatgtatgttctcttggtttggggtggagacttctatagatgtctattaggtctgcttggtccagaggtgagttcaagtcctgaatatccttgttaattttctgtctcattgatctgtttaatattgacagtggggtgttaaagtctcccgctattattgtgtgagaatctaagtctctttgtaggtctctaagaacttgctttatgaatctgggtgctgctgtattgggtgcatatatatttaggatagttagctcttctcgttgcattgatacctttaccattatgtaatgcccttctttgtcttttttgatctttgttggtttaaagtctgttttatcagagactaggactgcaacccctgctttttttttgctctccatttgcttggtaaatcttccgccattcctttattttgagcctatgtgtatctttgcatgtgatatgggtctcctgaatacagcacaccaatgggtcttgactctttatccagtttgccagtctgtgtcttttaactggggcatttaacctgtttacatttaagattaatatttttatgtgtgaatttgatcctgtcattatgatgctagctggttattttgcccattagttgatgcagtttctcgtagtgttgatggtctttacaatttggtatgtttttgcagtggttggtaccagttttacctttccatatttagtgtttcttttaggagctcttgtaaggcaggcctggtggtgagaaaatctctcagcatttgcttgtctgtaaaggatcttatttctctttcacttatgaagcttagtttggctggatatgaaattctaggttaaaaattcttttctttaagaatgttgaatattggcccccactctcttctggcttgcaaggtttctgcagagtgatccactgttagtctgatgggcttccctttgtgggtaacacgacctttctctctggctgcacttaacattttttccttcatttcaaccttggtgaatctgacaattatgtgtcttggggttgctcttctcgagagtatctttgtgatgttctctgtatttcctgaatttgaatgttggcctgtcttgctaggttggggaagttctcctggataatatcctgaaaagtgttttccaacttggttccattctttctgtcactttcaggtacatcatcaaatataggtttggtcttttcacatagtcccatatttcttggaggctttgttcattccttttcactctttcttctctaatcttgtcttcatgctttatttcaagttgatcttcaatctctgatatcctttcttttgcttgattgattcagctattgatacttgtgtatgcttcataaagttcttgtgctgtgtttctcagctccatcaggtcatttatgttctgctctaaactggttattgtagttagcaattcctctatccttttttcaaggttcttagcttccttgccttgggttagaacatgcttcttcagctcagaggagtttgttattactcaccttctgaagccggcttctgtcaattcatcaaactcattctccatccaattttgttcccttgctggcaaggagttgtgatcctttggaggagaagaggtgttttggtttttggaattgtcagcctttttgtactggtttattctcatcttcatggatttatctacctttggtctttgatgttggtgacctttggatggggtttctgtgtggatgtcctttttgttgatattaatgctattcctttctgtttgttagttttccttctaacagtcaggcccctctgctgcaggtctgctggagtttgctggaggtctactccaaaccctgtttgtctgggtatggaggctgcaaaacagcaaagattgctgcctgttccttcctctggaagctttgtcccagaggggcacccaccagatgccagccagagctctcctgtatgaggtgtctgtcaacccctgctgggaggtgtctcccagtcaggaggcacaggagtctgggacccacttgagcaggtagtctgtcccttagcagagctcaaatattgtgctgggggatccgtttctctcttcagagccagcaggcaggaatgtttaaatctgctgaagctgtgctcacagccgccgcttcccccaggtgctctgtcccagggagatgggagttttatctataagcccctgactgggactgctgcctttctttcagtgatgcccttcccagagagcaggaatctagagagacagtctggctacagcagctttgctgagctgcgatgtgcttcacccagtttgaacttcctggtggctttgtttacactgtgacaggaaaactgcctactcaagcctcagtaatggcggatgcccctccccccaccaagcttgagcatcccaggtcaagttctgactgctgtgctggcagcgagaatttcaagctcatggatcttagcttgctgggctctgtgggggtgggatccactgagctagaacattggctccctggcttcagcccccttttctggggagtgaatggttctgtctcgctggcattccaggagccactagggtatgaaaaacaaaaactcctgtagctagttcggtgtctgaccaaatggctgcccagtttttgcttgaaacccagggccctggaggcataggcacccaagggagtctcctggtctgcacccaagggaatctcctggtctgtgtgtttcaaagaccatgggaaaagtgtagtatctgggcaggagtgcaccgttccttagggcacagtccctcagggcttcccttggctaggggagggagttccctgaccccttgggattcccaggtgaggcgatgccccaccctgctttggctcaccctctgtgggctgcacccactgtctaaccagtcccaatgagatgagctgggtacctcagttggaaatgcagaaatcacctgtcttctgcgttaatctcactgggagctgcagactggagctgttcctatttggccatcttgccccttggtctggttttcaaccttcagtcttccatatttattttgaatgaattttctgcagctttattaaaaaagaatagaaacaagtaagagcaaagcatagttggtttatggttgtaataaacttatatgtatgtcctaatgatttgacagctttgtgatagtatcttgtaatccaagtacatgatatatttctacattatttagatcttgtgttaggtttttccataagattaattttcttcatattggctttcttgctatgtttctttttagcataaagctaatccaggaaaaggaataaaactggaaggaaaaaatgtcttaaaccattaatattggctgaccccggtggtagggttatgaatgaaacatttttgcttcttccacttttttatattttccaaattgtccatattaatcatgtatgatttttataataataaattaatgaaatttaagaattagataattgattgaattggataattgaattaataaaatttaagaatgagaataggaataattgtgctttgaaaagtcatatacacaagagttttagatggaattcaatactaaatttatatgctatactaaatcagtaattctcaaggagcaaaggtgctggggagtgtggaggagctctttgttggtgttgcacatacaatttaagacaacattttccttattcctcaccattttaaccatatcacctaaccagcctctggtagcactcaatagacatctgatgaatgaatgaataagtgaatgaaaacattgtgacaaaatggtataacattttgtatttgaaaaatatatgaaaatctattcttttcaaatataaaatgggaaaataaaattcaataaaaatatcttggttggtgagaatacacaaaagatataccttcttgtctatgaattagtaataagaaattgtcttgaggaagtcaactacatctggaaggttctctctggacaaggagcataagtgaaaaacagtgcactaaattataaccaagagttgcaacttaccattttaatgcttcagcacaggcacagagactaacatttactaagcaaacaagaagtcttggcaagttaattaaataatgaattatttttggtgaccaaggagttgggcttctcattttaaaaccatgcatgagatttttccctttctacccattactaaaatatcgtattagtgtgaaaaattataccaggactgggagaaaaagaaatcacatctgtccttgacaatgggctgaatgaagaggtgaaggagtggttttactatctaagtgactgaaaaataggttatggtgccccagcaaatccttgttgtttgctgacaattagtgatgtctgtttaaatcatgcagttttattaggccttaaaaatatcttttagttagtttcaatttcatcaagggaaaaggagagcagagtagagtggaactctgctcagagtccggttggaagccttcaactttgttctccctgttttcagatgagtgtctatttgtggctctaccttttctctttcttctcttaccatgacactcccctcttctctcttatcttagctgttcttttcttcttccgcatattaggcagtgggagaaacaccctaaatcagttggaggtgaggaaagaagaaaagcacccctatcttggtagttcctcattcttcccttcgtcacgtccatgtcatcaggctctgccttcatctgcgatctggatacaatccaatttatagcatccattcaaccaaaaaatattgagctcttactatgtcaaagtagtgttctggatgctcggctccatcagtaaacaacctagactaacatcttgccgttgtttacatctcgtggtgtagagtttacaccttgtggtctagaatttacatcttgtggtggaggcaggcagatgattaacaataaacttaagtaggtctagatgtcaaaaggtggtaaatgctacaggaaagagcaaaggtcgagccaggtaaggcagattggctgtgtgggtgtggaggaagggtgcaagagtactgtcaagataagccttcctgagaacatctgaaccaggacatgaaggacatgaggaagtgagacagtcgctatccagggaaggaatttccaggcagaagaaagagccagtgttacgccttaaggtgggagcatttctgcgagactggagaatcactggagtccattgtacttggagcccagcaagggagaaaagattggaggactcaggaggtgctggggcaggtgaactgctttttgattggggagttcagagggtaatgctttggataaatgtaactgaaaactttctcagaagtgttttcatactatctctacaattcattttcatgtgaaaacttaattggcgagcagattaatatggtgatcttcccttagatcactaggaaaatcttgttttatgaatttttcttcccttttcattcactagcagagaaaagagttgtaaaggagccgcagaaaattatagtaggtttctccctactactgagctactgagactggaagatgctcacgttagcaactgagtatatttatgtatttccctttaatgtttgaagggtcaggaatatttgacttaggatactagtctgtttagaaacatgattcaactagctacatgactaaactagcagctgtcagagagaatgcaaggtcaaaacttagtagttgataataataaagaaagggcagagtgttatgaaatgttatgatctgggtaatccattggctcacttttttttgtcagcctaaggttacaagatgataaattaagttgctaatattctatatctaccatttacttttcctttatcatgtgtctggcaatatgctgagtgttctacctctagcattttattcaaactgtgcaatctgcctgctgaaacaagtatcattaacttcatttcctaaggtgagaaaattgaggcccagagaggttaaataagtttaggatcatatgcatagctggtaagtactatactttaatatccctttgccttcatgctttgctctcactccatgtttaaatgagcagagagacttatctttaaacagatatatagcaagtagtattttccaaatgaattccacaagatgctccattgcaaaagttcaaataagtttagaaaaatgctgcaaactttgtgcttcttaagagatttacagtgcagattagcacattaaagcctttgggaaatttgtattagaaaaacctttattaacttatttaccccaatttttccaagctttttgatcacgaaactctttaaaaaacaacaagtataattgcttttatagtattctttgggatacacttggagaagtgttacatgaaaagatatgattggataaatttaaatataggaagaattatttaatcattttttggaataaaacaccaattttaggttgtctaacatacatttgagccaagacatgaaggacatgaggacataatttacttttgtccttgtaaggacataatgcacttttagtggtttgcattgtttattttcttttgaatttcatgttactttataaaggtaattatttaatcaaaccatttgttaagtgtcagacactatggtaggtgctggtaatataaagagaatatgtaaacatcaacacaacatatctcctagtatgggcttacagtacagtgagagacacaaacaaataatttgtaggattgaaataagtcttacatttgccacatcaataaagcactatggaaacaaaggcacaagaacttaactttgtccaatgaagtctttcaggaggaggtgatattggagctgaattttaaaggattcatagatgtttatctgaaggactaatgcaacatgttggaggtgagtcttcaggaaagaggcaacaagaaccatttgggtaacaagataggacttggcaagttaggggagtcgtaagtggttcattacggctagaatccagggctctctggagagattgggagtacacagatcactcaagggtttggtatgaactgtcaggctactaagacagaaataacaaaaatcagatgtgggtttagaaagagcattttggctgtaatacagaacatgatggataattgatggagcgagattcctggggagatagaagaggatagggccatgtaagtacatctgctggtattttaaaattagaaaaagaaatttttggtagcaaaatcagaacagacccaccaactctttgcaaatcatgggactagaatgtttggaaaggaagatgctaacgattttcattcatttgtttatcatctatgttgagtgtcttcttgggcctaggcagcatgcccaaagctgggagaataagatactgtatgagatgctagaaagatccccacctctcctttccagaaattcagtatatcagactaattggtttacagttgtgaccatgggcttttggcatagctgttcaacaagatttcattctttttcaaaagcaattcattcatccaccaaatatttgttaaacaaatgtacgttgcattgtagtgggtcctcagggagctggatgtacatgccaaatatgtttcattttatttgaagcaagtccacagacaagtaaactagtcaagtgataccaggcaaagtgatttgctttccaacagatggtgacagattaatttcctaagagactgatctgccccagaggcactgggaaagtcttgttagggaggtagattatagtcaggaccttggaaaattgttgggaataattgaggtcaggaagggtatacttaggtggatggggacagcccctgaacgagggatcagtccttttggagtgagcacggaatattcaggtgcctgggaggagtgaaggcttgtgcttcagcactgattgtgtgcaccgatggtggaacatacctgcctgctcagaagctttggcttctctctgtaggtgagagacagccattagaagtccttgaacagggaagaaacacggtgaaagcaaggatttcattgagaagtccctcatggaagaagaagattacattggaaagagcctggcttagggagggagcagtgacaatcagagaaaaaggcagataggggcaaagatactggaagaagaggaaaaactgtccaaagctttgtccttgtgtgggaaagctggtgctgttggcgtgaaagaggaagcaagaacatgtgcactgacacggctgagagtctccaaaaccattgtctttccttaaaacagtaatgatcacaagcagcttacaactttgcatatagccactggggcaaaatcctattaaaagctaattcattatctgagccagtgcatgataatgcgatgtaaaggcgtgttgggaggcagatgatcagaacttttaagcaaactaaatttcataacatttattagaagcctgtctctatttccagaaaacgcctataaatgtggctgtaatgtaggctacaggtcatcacactgaagtagaagcaatgtacaatacctgaaaggttagagaagttcagggtctgggcttataaaaaacttcattattcatttgaaagatattgttttgtatcccccaattgtggttttcaatgtatataaaagcaggatatcatactttttgatctatggatttggaaggggataatggtgtggtgggcactgagcatatggaattatttaattagagagatgccctttagattactataaaatataaccagaatctcctgtttagacttctaaaatctacttctttgaaaacactactaaaatgaccacaaagacctgtcctcacaagtgggagctattaatcaatagtgtgtacacatggacatagagagcagaataataaacactggagactctgaggggtgggaggggaagagggaggtgagggatgagaaattacttgatgggtacaatctacactattctggtgattgatttctctctgtttcctcttcagaaactgagaggaaatttagtttcctcagtcaccactcctccaaactcctgcgtgggtgatacaagacttgctgtcatcttgaggcagaaggggttaggggatttccccattgaacctgatagccttcatttcatttctgtcttctcagggaaacatttacccctctttactaaatggaagaaggtttgtaaactaggagggtatctatggatctgattgctccttcaccactctgctatatatccatgtaacaaaacagcgcttgtggccggatacagtggctcacacctgtaatcccagcactttgggaggccgaggtggtcggatcacctgaggtcaggagttcgagaccagtctggccaatacggtgaaaccctgtctctactaaaaatacaaaaattagctgggcgtggtggagcattcctgtaatccttagctactcgggaggctgaggcaggagaatcgcttgaacccgggaggccgaggttgcagtgagccgagatcatgccactgcactccagcctgggtgacagagcaagactccatcgtgggaaaacaaacaaacaaaagaacagtgctggtaccccctaaatctataaaattttctaaaaaataaaatgacaataaaggaatgaaaaaggcataggtacaagcagatgggataggacactaaagcaagctggagtaatactggaattctagaaggtagaaggcttagcagagcagttcaggtggaacccacgcctgtgggggcaggggcatgagcagtgagcccatctaactacgggaccccagataggcttgggatctagaagcgacagatgcctctaaaggctgggggtaggctgggactgaaagcagaattggtgtaaagtctttaaaaggagcaattagatccacaaataccttcctagtttctaattattctaccgcttaggagagaggggtaaatgactccctgaaaacagagaaatgaagtgaaggctatcatgttaaatggggacaacacctagcccctccttcctcaagactgacaggaaagctcctacaacccacgaaggagtttggaggggtgttgtctgaggaaactaataagtccaagagaaagaaccttcagaaacggacatttaaaggattaggtccccacccgattaccctagagatacacatacagaaatgtgattggacagtcaaggatcaccgtatgatgcttctaacctgaacaatagacacctagtcacacacccaaacaatcacacacacacatacacacacacacacacacacttacttcacttctgctggaggaatttacaagatgaagaacatcttgtatctcttttgggctactgtttgtgaaaggaatggttgcatgtgctcttggctaagccaactccatcctgaagacagatttttgtgaggtgggggaaattcgcccagcgttaatagtgttagtggttgtcctgggtccatcctggtctgtattcctgctttttcattttcagatttaaatccagagttattacagatggtaacatctgatgccaatttatggatctttttcataattcacctgctaggaatctcaggtaacctataaaatatgcttttatttggtcattttaagagttacgtttctgaatttcaggtattttatcctgtattgtcagcacattaaattagggaacacattcattgacattctatgtattttcctttgtatttcaaagtcagagtcaagtatttaaaaagataagatctttcattttgtgtgtgatcccacggaatactttctactgtagatttattaaaattctcccacctctggcctctgattaaggaattgcagagtattctctatgacaactcattaaacctattattccccccagggcggtttagtatatcactaaatatacttttagtgatatttgttgattggagcatagcttttgtgtttgccaaacatcattgatgtgttttgaggtcatgtggttgtggggggcagggggtggttgtaaatgtaatagtgtccctctagtattgtaatacttcaaggacatagaatttattttttaaagtcttaaatctttttgtttgtttttctaggaaatcttgagtctatgttctttgatttgagactatagagtttcttggtaaagtctccaattattggttttctgagtaaattcttgagaattggtgaggctcccaggattattgtttgtcatcctgttctaattaatagagaaaaagcatataaatcttagatgtcttagatctgggactattgcatctacttggcttgagccaaagtgtcatctaatttttatccagtaattgtggcaacatattgcttccaaaacaaatcacatttgtaaatgcatattgagcattttctacatgaagggcattaccagggagtgaaagaaatataaggtctgaattttgtcctctgggagagaacattctagtgggagagatgagttgtgaaaagttaaataacaaatatttatagatggtcaatataggaacttgcaaatattattaagattaattacatgtgaaaaattgttattgaattcaaggcaaaagaagtgaacttaaactgagttgcacaggaagaactcataaaaaggtgagcttgtgttggatgagtggatttgggcagataaagaaagacaggagcaaaaataaagaggtggaaaaccacaggggtgtttgatgtatgcagggcacggaaatcagttgtatggtggggggtaccttcaacttaaaacctctgtaccagttagggtgcttgagttgtaagaagccgaaaccaattctggctcatttaggcggagaaagaatttacaatccatgactaggatatatccctccatctatttaatccctgtttaacttttctttattttttatagtttgtatagttttctatgcagaagacttgcacatctttcgttacatttgttcataagtatttgacacttttatgttattattaaagattttctttttttttttttgagacggagtctcactctgtcgcccaggctggagtgcagtggcgcaatctcggctcactgcaagctccgcctgccgggttcacaccattctcctgcctcagcctcccgagtagctgggactacaggcgcctgccaccacttccggctaatttttgtgtgtgtgtttttagtagagacggggtttcaccgtattagccaggatggtcttgatctcctgatttcgtgatccaaccgcctcggcctcccaaagtgctgggattacaggcgcaagccacagcgcccggtcaagagttttaaaaaaatttcagtttctaactgttgacactacatagaaatacaatagatttttgcatattgtccatgtatctgccaaacttgctaatttaacttattaattataataattttatctatggattcttttggattttccaaatatacaacatgccatatatgagtagtgacatttttatttcttcttcctagctccgtaactttattctattttcttgacctactgcattgactaggatccttcactacaatgggaagaaaaagtgatggtgggcattcttttctcactcctgatcgcagggcagcatttaacttttcaccattatgaatgatgtttgctctacagatttctgtagaaccatttatcagattcaggtagttaatcctaacttggctaacagcaattaaaaaaatgaagtaatataaaaattaagaaattaatatgctgctaatgatatgttgttgagtaacataaatataccaatttttctatatctactgagatgatcatatgaatattgttctttatttactatggtgaattgcattcattaattttcttttctttttttttttgagacagagtcttgctctgtcacccaggctggagtgcagtggtgcagtctgagttcactgtaaccttcacctcctgggtccaagtgattctcctgcctcagtctcccgagtagctgggattataggtgtgcaccatcacgcccggctaatttttatatttttagtagagatggggtttccccatgttggccaggctgatcttgaactcctgacgtcaagtgatctgcctgtctcggcctcccaaagtgctgggattacaggtgtgagccactatgcctggctggattcattaattttcaaatgcattttaaaatttctgaactaaatccaacttgattataatatactatctttttttaagggaaaagtagatgaatcagactcagcaaaaataggagccagaatagcaactgatacggtttgtctatattcccacccaaatctcatcttgaattgtaatctccataacccccacttgtctagggagagatctggtgggaggtgatgggatcatggtggcagtttccctcttgctgttctcgtgatagtgaattctcatgagatctgatagttttataagggcctcttcccccttcgctactcactctgtctctcacctgccaccatgtaagacgtgccttggctactcctttgccatctgccataattatctgagatctccccagccatttggaactgtgagtcagttaaacctcttttctttataaattacccagtctcaggcagttcttcatagcagcgtgaaaattaactaatacagcaaccatggcaggggaaggccaagcaccttgactgagtatatccaatgggagaggagatttttttctcacagccaaatcaggacactcacagctttgtgtttaaaagcttgggctctggactcaggctgcctggtttgaagtgccagtcctccctcttatgtggcaggggaccttagctctgagtatccttctctataaaggaggatgatgttctatttacccaataagattctaaggattaaatgatacattaaagtgcacaggtcagatcactctcagcccatagaagtaattataattccagctattattattgttatttgtgaatatgagaaagaagaaagttcactctgacatcctgtaaatggaaaattcaactgaacattgaaaaatgtttaaatctgtctatcagaaagtttttcatcaaaagaaaacactgagtagtctagtgttgtagcttgatccaaaaccttgaataattttcaaactcatttatgatatctgaaatattcaatgacttatacctttgaattttttggcagctttgtggaggtatagctgacatataagaaactgcagatattcaaaatgtacagttttataagttttgatgtatgtatacaaccattaaaccactaccacaataacataaggaacatacctgccccccatccacacatttgatgcgcctccttttaaaattctctttcctaccctccacccctcactgtttaccaaaaagaatgtctgatggtgccctgggcagtcccactctgcctagaaaacaccatagaaaaagacagcaaaagtgctttctcactctggagttctacttgattttaatggacatagattagtgtgaaccacataaaccagtactaaaatacaggatttgatctagaaaaggtgatgctaaaaatgcatgtagataaaacctaatttttttcagacaccaaaatgaaaaattattagtatgccatgacacatgaacacttttatattccacaaccactgtgctctccttttggtgttcatttgcaatggatggaatgtttatgtcccttccaaatttgtatgttgaaatgctaactctcaagatgatggtattaggaggagaggctgttgagaggtgattaggccatgagggtggaaccctcaagaaaaggattagtgccctcagcaaagaggcctaggagagctagcttgctcttcccagcatttagggacacagcaagagggtgccgtctgtgaactagaaagcaggccctcaccagataccaaatttgccaatgccttggccttggacttcccagcctccagaaccatgagaagtaaatttctgttgtttataagccacctagtctatagtgtgttttgttttagcaggctgaatggactaaggcattatttattgtgagttctattcaccatggagcatatgtggcctatgtgtccctggcactgaggcaggaactgagcagagtacgcaggggaattaataatgcttggacctatctttaaaacacctagagtttagtaggaatcaactggaagtagtagggtaaaggaaagtaggtgacttttgttgagccctgccatgtgctagagactgtgctaaagtgatttacccacattatcttatttgaacctcatggcaagcctgtgtggtaggtcctattcctctatttacagatggggaaactgaagctcagagacattaagtaatttgcccaaggttatagaattatcagcaacaaagctgaaagtggcaaagggctctttctagtcaggaggaattaagagagcttgggtgcagtggctcacatctgtaatcctagcattttgggaggccaaggtgggaggatcagttgagcccaggagtttgagatcagcctgggcaacatagtgagacttcgtctgtacagaaaaaaagaaaaaagaaaaaaagagcttgggatcgtgcctcctgtgactcagcatcaccttagtcttggtctgcctccattctgaattgtgccctaaagctagtcattgcttccttcttggtttctgctacaagtttctgcctctcccactggcccatttccggggttcctgttcctgttatgcacatcaatccctagatttctgaggtcccagagggtgggcttctgcttagtccctgtttgtcttcccagggctaggcatcctggtccttagccctggcactggggcttctctccctgctgccttcgaccccccggggctgaccatctgctgctctatccctgcatcctgccagctttcacatcccctgtctcgagctctgcttgccctttactcttgaggggaactccctgcctccacctgttggactggtctggtcccttcactggtcctgccctttctgaccatcttctactctggtctggcctcccattttccagagctcatctgtctccatgtgtgtcctgcttctcagagggtcttgagttccagcttttccaggtctggctggtgccatggccaaaacctgtcccacctctcccattcgagttcctcactagctcctttttgacagttctttcttttttggggtctagctttggccttgctgcatgaatcattaacacataaatatgtgtcttcacaattaattgtttccatttggtgtttgctctagtcaaggaggatggagagggagcaacatcttgtactgaatgtcttgacatcactaggaactagactgcttgtgcttcccgggcatgctgaggtctcaagaataaagagtatccctgaagacattcttatcagtcttccctggtgaaacattcatcctaatttttccttttagctttgagaccacttttgcatgatttttaatatgtcattaaattaaatagatataattttctctgtctagccaagctgctgttagaagaatctttgcatacaactaatcataaaaaagacattcttcttgcctctttggaaaggagcctgtgtcacctaagagtgaggagtacactcattcttttgtgccttgttcatctgctcaggggattattgattagcagatagaatgtgggtgcaggctggacgcagtggccatgtctgtaatccagcactttgggaggccgagatgggtggattacttgaggtcaggagtttgagaccagcttgtccaacatatagtgaaacccccgtgtctactaaaaatataaaattagctgggcgtggtggtgcatgcctgtagtcccagctacttgggaagctgaggcaggagaatcgcttgaactccggaggtggaggttgcagtgagctgagatcgcgccactgtacaccagcctaggtgacacagtgagactccatctctcaagaaaaaaaaaaaagaaatgtgggggcagataagttttttggggggtttgcttttaattctttggaagaactgggcttggctggctgggcacctagagcaatgtggacatgggcagctgcttgtcccatggatgccagggacagagtcacaagagagacggttagaaatggtgccaggttctcgctgcctcgtgccaggtcagctcccaacaaagcctttgtacaagacacatataaaccctcagagagtttatgctaacccagtgtcttggccatggcttactcatgatggaaaactgatcatattttattctggccacatggaataatagacatgtaatcactatgagatttgagttgcagggtctttggtttctaataacctttataattttctccctcatcagggagacagaataaggtgtttacattactactttcattttgcaagaataagatcgaggttaaatctacagttatgtcttgatagactgcagcagatttctgcatcagtagaaagtgctgttttcccactaatcagaagaagaaagtgctagccataatgatatgggtccactgtgaagtagaagacaagaaacagagcaggacgtggaattgggagcaatgagaaaaggtgcctagagttgctcttggcaccctgcaccttagatcacccttattaactgcctgctgtttactctgaaaatctttctgtcatttttgagagataaaatctgaaaatgcagtttcttcaagttagaaatgataatttttataatagagtttaagaaagccatgcttcttttctcttctatgagaacatttttatttcaattataaaattgccactataaatagccagtcaagttcatagggcatgagtctcatcaggcggataatttacattatataaaaaaagtatgagttatttaactaaactaaaaaagcaaccagtatcttgtggtcacatactgtatgtgatcccttttacttgcaaggtaaaaagtggtttcataaccttgccaatataattccaaagaactaaggacttagtgatcgttgctaattgaagttattctgtttatgagcaagcaacactatttctttgatgaaaaccagaaaggatttacgtgtcggtaaatagggttcctttatgtttgtgtatgtgtgtgtgtttgtgtgtgtgtgtgtgtgtgtgtgattttatgaggtttgtctcattcttctatgctagtgagtgttgattagttggattgccttttcagttgacctattgctttttaagagcatttttggatatagtcccttaacccagaattaacttctatgataaaaacgctttttgggttgtcagagaggctaataggggatatatgggcagggagttttttaccagccgtcagatctcatcttgcagactgtaactactgtaaccatgccccatgaagggtagtacaaatcatgctattgaaattgagagagatggctgccttttggacaggaagagaactagaagtttttgactttgtgaatctaacctctgcagctgcatcccccagggctgctgtccacataccctgtgctccactccctctcatgatttctctcaccaccgtcattctttgtttctcttgttcctttatcctgaagctctcaacctatgaacctgtgaaaagcccagataacagtaacagattacatttatttatggaacatttattatagatggtgtcattttctaagtactttaaccatattgattcctttaatctttgcaatcatgcagtgaaacaggtgattctcatactcccattttacagttgaggaaactgaggcactgaggggtgaaatgacttgtctgggaccacacagtacgtagtcgagctagtatttggacccagactgtctaactcaagagcccaagttattggccaccatactctatagcacctctaacccagatcaaatatacacagcaccatcacatagtgaaattaatcagtgtcatgtccattccctctgcttaattgtatgtttcttgtgatgaggaacataagccatctccaatgcctggggccacacatagcagatgccctataactatcatcattgtcatcgtcattcttatcttcctcttcctcctcatcataatctactacatataaggcaaatttgtgggtcaggcacacttcacataaattagatttaattctcacaacaatcttacgaaatttgtgttgtccccagtttatagttgaaaagaccttgcatttaggaagtggtaaaatgggaatttgcgaccctgccatttggttccagaatccttcctcctaaccactctataccatatgcttaattaagaaaaaaagaaacaaataggtgagaaaaaacaatgatgtgaagaattttgctgcccccagtattaggattttttttcttcttcttgctagactctagagggcccagatcctgtggagctgtctctctgaagggaagggtcaggctgttcaccctgattttcctggagtcacagataaacttctgccctccaccggatgcctctatcttacacaattattttcctttacaaatttggttgatgacatattcacttgggataattgggttgtccctcctactttgaaactgtgagagagttcactcaatttccaactgcgtatgaagctcttgagtcagatttttttgcctgtaacacctcagctcacaccagtgcagaaatggaagttttaattggctgtaggattgaagggttggtttggtgcatggtggtattttaagaaaggcaaagttttatttaaatgaggaatattctccctgggttttttgagttagctactgggccatgcaacaggcctggctgcttgtgagaaaatgagaagggtgatcaagtacaagaagatgcagccaaagaagtggacacaatccacgtcaagttccatcttctttgtggcagccatgattctgaaggtcactgaagggtatttttccctgagctgtttttggagcctgtgccactggcttcaaatgctgggtcttggccacctcagttgctataaaatatggttatgagtgcttccgcttcccagcatctagctgacaaagccccacttgtgccttgctcagccccacttcattgctcctgccctctctggggagagggactcaccacctgggtgacaaggttagggcttcttgctgcactttttggcatcttgctgctccctgtataagggcaaagctaaccttttttttttcttttcattgagacagtctctctctgtcacccaggctggagtgcagtggtgcgatctaggctcactgcagcctctgcctcctgggttcaagtgattctcctgcctcagcctcccgagtagctgggattacaggcttgaaccaccatgccaggctaatttttgtattttagtagagatggggtttcatcatgttggccaggctagtctggaactcctgacctcaaggaatctgcctgcctcggccttccaaagtgctggcattactggcatgaaacaccaccccacctccaaccttcaaaagatttaaaaaaatgtgaaaactgaaatgaagactagatactaatgaaacattggactcattatgactttgttaagtcattttgattttattaaaatcaaacattaataaagcagactgtgaataaataaattatattctttggccatttcttcattagacaaggatgctatctttcatggctgtgttattgtggggatggctgatagctcatagaaccaatctaacatccacagatttttttcatagttctggactaggtttcttagcataatgcgttgttgtggtcctcatggtctgttgttctctcttgccaaccttgtttcatcagtcccctgttgtcctgcagatttttgaagcattggaatcctagcaacagatttctcatttaagtaggatggtcctgatcactagtctcccacagagagttggtaaaaagttttgttcttcttatcacccacagaacttccctgaaacattttttgttgtgcttgctcagaaaccataagcttagtagaaaaatgcaccttgcttgtgaatacacaatcaggtgtccaaatgagatggtcccctcctagaagataatatttcggaagtcttgcctcagtgggaggtacttggttgtttgtttttgttttttttttcatttcaatagctttaggggtacaagtggcttttggttacatgcatgaattgtatagtgctgaagtctgggattttagtttacccatcactcgagtagtgtactctgtacccagggtccttggattttatgggcttgtttttgtttgcttttatgttaagatatgaataatatgatatgctttggctctgtgtccccactcaagtcttatctcgaattgtaatccccataatctccacacgtcaagggaggtacctggtgggaggtgattggatcatggggggcaattcccccatgctgttgtcataatagtgagtgagttatcatgacgtctgatgtttttataagtgtttgaccattccaccttcacacgctgtcactctcacctgccgccatgtaagacatgcctcttccccttctgccataattgtaagtttcctgaggccaccccagccatgtggaactgttgagtcaattaaacctctttcctttataaattacccagtctcgggtatttctttatagcagtgtgaaaacagactagcatataatagaaggctctttacctttttaaacttggaaggccaaattaatactgtcctttccattataagaatcttcagattaaatattttctcattcattgtccctcagatcatatacatttgctttttaactctaagttacatgtaataaacaatgaaattgtattgtggatcataaacttgagttttaaaaagatttttctcctaattttaaaagtaataaaaacaataaatacttactgtattccaggtagtgtttttttttttttttgagatggagtttcactctgtagcccaagctgtagtgtggtggcgtgatcttggctcactgcaacctccacttcccggcctcaagcaattctcctgcctcagcctccttggtagctgggactacaggcacaagccaccaagcctggctaattgttttgtactttagtctctactaaacagggtttccccatgttgcccagggtggtctcgaactcctgagctcaggtgatccacccaccttggcctcctaaagtgctggtattacaggcgtgagccaccgcgcctggcccaggtagtgttctaaggggcatgcttccattaattcatggaattcacaataaccctttgttgcagtaactattattatccccactttacagataggaaagcggtacagtgactggggcagagagaggctctgtgactttgtgcaagcagcaatgtaggcatttgaatttcggcacgctggctcctgagtccattctactaaaaattgtgctgtatttaatgcagagaatttcaaaaacatgagataaaaaataagagaagaatagcatcaattttcccatcattcaaaggtatctgttaaaaggaaacatttaaaacttagctatatatactttctgaatttgtatgtacatataaacttataaaaaatgaaaatgctaattgttttcacacgtactgtttggtagcctccctttggtatgttcccagaccaaaaattattattcttccccatgctttttttcagctacataatgttctattttatggaagtacatcatttccataattgaatttcttattaagacatattatttgcaaatctgcaacaaatgtgcatgttatttttagacgtatgtttggttatttctttacgatagagtcctagaatcaccggctgaggcaagggagatgcacatttgaagcctctttattcatcttgccaattgtcctcaagaaacattgtttcaagtcccattaatgcaagcaatgaacaaaagtttttatttttctggatactggatgcctctggcttatttttctttctattctgtttctttaatagacaaaacaaaagaaaaagtttctcatatcaatgtgcatttttttgcgatttgcaaaaagttcaaaaattaacaaaatttatctattccttgagtaaatgtatgtggttcaagatgtcaaagaaacaaagtattgtgcagtggaaaatgagtgcaccttcagcacctgcctcccagacatccatcagtaaccctctcaggaggcgaccactgttaccatttccttgactagccttcctagaataattatgcatatacaagcaaagaagggtataagggtacacacacaaataagcatactacatatattgtttttgcccttgtgtttttcacctaacaatatattttggaaattattccatattaataatcaaataatgatattattatttttgatgcctacctactattgcattataagggaattataagggaagggttgcaaatattaacatctgttaattagctttggatatttcttcttttgcaaatacttgccagtgttctttgagcagtcttagaattgtggttttaatgttttgttattgatgatgatttgtaagtctttgctgtgaaataagatgaccgaccattggtattaaatgatgtaaattttatttcacatttcattgttgtcttttcaattttgttttctggtggtaggcttattttgttgttgtttgttttgttttggtgtggctatggaagtctttttgggcaatcaaatctatcaatcattttgatttgatttgtgaatgattttcctggattttcctggatgatcagaggctagtgttgtctctttgtttacttagattcttttgacaagggctttggctattgtgaatagtgctagtatgaacatggatgtgcaaatatctcttcgagaccctgctttcaattattttgggtatatgtccagaagtggaattgttggatcatatggtagttctatttttaaatttctcggaaactgccatactctttctcataacagctgcaccatttcacaatcccaccaacagtgcacaaggattccaatttctccacaccctcaccaatgctcgctattttttgggtgttatttttgacagtagcccatcctaataggcatgaggatcaattgttctgaacataacatttctgtcagggtttttaaaaagtttccaaaatgacatccctccagctccacatattctataagagcaatatcataaattagaagctgtctatgaaaacttgtagttggaagatgtttgttttctgtgggttagttacatttcacatatgcctcatttgtgaaataatttctaatgtgcatgagctggaattcaatgcctgtagtcaaagtaggcttaattttgaattggagttgattaaaatgaaatgactaattagctttatattgacttgggagttgtcccctaaggaaggcattgggacaatgttgatactctgattacctctattcctacctctgttagcttaaaatattagtactgcattcagcacccagcaagaatttctagtatctgaaggcagcaggatacttgcagccattttcaaaccatggaatatggatgattggtagagacttctctatcttgagtcccttctaatatttcatgctttatcttattcataagaaggggcttcactaagtaggactgtcttgtcttgaccactaggggatcaaggttaagtttcttagtcttggtaattgtcagatttctagtctttaaaatagggataatgtcatggagtacctatgtcagagttgcaaggaccaaacgagctaaggcatgaaaagcatttagcaaggtccctggcaagtaagggctaaataaacatggtgtttcttgatgttatgtcttgtaaccattgtaataatctcagtcaatcagatttatatcagggtacaggttcttttctggggaatttttctagcaccaggtattttctgtttatcttctatgtggatggcttttccttatttcttctcattgacaccaagggattccaagtcccattctgattgtgtattgtcaaagtgaaaaacagctgtggccagcagagccatgactataaccattttcaaagtcctgtgtgtaacaaacctcaaggattgatttttcactaagcctttctccttgactgtcaaatgacaagcaagggtatgcagatgataaccccgaacccctttgatcccatttccaaaatatggccatgccatagatgaaggcaaattgttttatttcatcttgttggccccattgtgtatgctctaagttcattttggacttctgtctttactgatagcaatttctatttctttcagacagaagccccttctttcataccttttagttgcatttcttagcattctggccgcagtcttctactacatggtccttatttgtcatctcttccctttcttcctctctccatcccttttttccattattcatccagcaatatttattgagaaccaaccatgtgaggggcagcacactggacattgtcttggcttcctctgtcactgcagatttaatggatcactttagacttatgcctgtattattgccagggttcccctatgtatattgaaacaaatagtctctggggatctttccattttctgccactgattttttctttcttttctttttttttgagatagagtcttactagctctgtcacccagcctggagtgcagtggtgcgacctctgctcactgcaacctatgcttcctgggttcaagtgattcttttgcctcagcctcctgagtagctgggattacaggagcgcaccaccatgcctggctaattttttttttttttttttttttgtatttttagtatatacaggtttttctcatggtggccaggctggtctcaaactcctgacctcaagtgatctacctgcctcggcctcccaaagtgctgggattacaggcgtgagccaccacacctggccattttctgtctcttctgattgggctgtgtatctgagctgtgtcctgggccactgtgccatcccacagctgacaaaatggctctcacctccaggaaactcttacctcagcattttttcctctgtcttgagcttttcttttgttctctgggaatagtcctcttactttcttggagcttctttagttattttttgatcaattttttttacacagttttttgtaacggagcaaaatattttcagaacttgtttctggcatgtgtgtgtctgtctcatctatctgcctgtgtctatgttaaccgttctttgaatctgatgcccaatattctatttgattctgttgattctgaaaatttctttttagtcattggtttagcatttctacctcttctccttaaaccctaggattttctttaaaaagtgttgggactgatgttctgttcttcagattggcgaacatggctcaaagaccactagtgtttaagcagcagcagcttttctatattctgcttgctgtgggcacttgtgatgtcccactgtggctgccatcagcagagatgtggatcctggtggtggctgtgtctgcctcctggccagccagcttcctttatagggaagaaatgcttccgcttcttactggggtgtgagaggcgggcccgtcagtcactgctgctccctagcactcatagcaatgtccattttctatcctttgtgccctgatgataatctttctggtatcataactgtcttctcctccccttccctgtctcctcttcctgctttttttcttcttcctccttctcctcctcactccagtatcaaggcttagcttaaatgtgttgcactataaaggcctcatattttaaaaatataattcattcagtcctcctctatgcctaagcttatttctttgttatggcacttttcatttcatagtatagctctctaccgaggagcgcatacgggataagggcagagtatgagtattttttgagcccaaaaaataatagtcatttttattggtatagcttcaagcatagttcatttacatgatttatgttttaggaaatttcaagtgcagaaaaattgcccagcagttagagatgattgggttatcaatatgctccctgttttttggtgtattttttccagctttattgaggtataacttacaaataacattgtatatgtttaagatgtacaacttgattttttcaaaattaattatttttttgaagtaaattttattgtgtatacttaaggtgtacaacatgacgtgatgagatatatatagataataaaatgattactacagtgaggcaaactaacgtatccatcatctcacgttgttatccaacactaaaatctacgcatggagcaaaaatgcggaatacagtacaatatgattaactatagttctcatgttgtagattaaatctctagacttgttcatcctatatctgctactttatagcctttgatctacatcttctcattttcttcccttcccccaaccctccccataaccactgtgttatgttctatttccgtatatttgacttaataaaagattccatatataaatgagatgatgcaatttttttctgagtctttgtttatttcacttagcacaataacctccaccaggctcatccatgttgtggcaaatggcaagatctcattcgtttttaaggctgaataatattccatttgtccatttgtccatgaattgtcacttaggttgtttccatatcttggctgctgtgaatagtgctgcaatgaacacgggggtgcagatatctttacgaggtggtgatttcattcctttggatatatattcagaagagggttttctggatcacagagtaattctattcttaattttttgagaaaatttcatactgttttccgtaatggctgcagcaatctacactgccaccaacagggtacagggttcccttttctccacacgctcaccaacacttgctatttcttgtctttttggtaatagaagggcagggcatcattaatattgtttcccttacatgtgctgaacaaacacagcagagcagttaccagcgctaactctggaactggcttgctcatgctcatctcttgtccctgccagttcctaactgcggaaacttgggcaagttgcttaacctctctgtgccttcctttgttacttggagctgataaaaataatgcttagaacagttactgccatataaaaagtgctattaagtgtttgctattatgtgttgaattcagcttaatagaatcatcatcaggatcaccagcaatttattgagtgacagtgtgtgttttattcattgatcgtcattacacttagaatagggtcggggatatagcaggcattcaatcaatatttttgagggaatgaattaatgaatgggctagatgttatatatacaaagaaatatgtctaatttctttccttcaggtctcacagatggttgagaatacaagatggagataagacgaaaattgaatggtgcttaatatgaagcccttcaaggctgcctctttcagaatcatttaggaggcttattaaaattgcagatttgctagccaaactctcctcgatctcagttccatagatctggacgtcggtccaaaactctacagtgccaagaaagctccccaggggcttccggtgaattcccaagaacagccaggactgggatcgcaggccaggcagtaaatgatacaggagatgagaggagggagagctctgggggctgacactgttgggaaggcctggtgggaggggaggtacctgcaagggcatgtagggcttgggcatggggtggacttgatcgtgggggcttagactgcagtagagacattctggtcacatttgcctgcccatgagctccttccgtctcctgatgtgcctcagcaatttcatgtgcaaagtacacaagagccatttgttggaaagtacctaaatcactctatttactgagtgctttacttgcacttataaatctaaaacaaattttcaagcaaataaacaagtgtgtggatatggagcagaaataccactcatggcatcctgaacttggccctctgactcagtaattagtatcctaaaactgagttcaagcatcacattttattttcaggttttacatacttcatagaacttggtctctgatgttacagagatcacagtaacagtttaccttatctccagaatttctaacttctcaatggtggcatctctcattagaacaggtagtcaccaaatagttccacacaaagactctcccaatgtgtcatttattaaaacaaacaaacagatttgatatacaattaatataccacaaaatcacccatctaaaatgtacagtctggtagtttttaacatattcagaattctgcagctttcaccacgaattaatcgtagagtattttcatcaccccagagccacccctccctacctttagtcacttcccatttccccggcccctgataatcactcatctgctttctgtctctgtggagtactattctggaaatttcatataaatggaatgatacaacatgtggccttttgtgactgacttcttttacttagcatactgttttcgaggttcatctatattgcagcatgtgtcagcacctcatttctttttgtgctgaacactattctactatataaatatacttcattttctttatccactcattagcttgtacacaactggatttccactttttggctatgtgcaaagtttctgtatgcatgcatgttctcatttctcttgggtacccacttaggactggaattcctgggacatgtgctaactgtatttatctaactttttgagaaatcttcaaaatggttcccaaagcagctgcactattttatatgcctaccagcaatgcatgagggttcaatttctccacatcctcaccgacatttgttattgtctttgattatagccatcccagtgtgtgtgaagtagtatcttgttatagttttgatttgcatttccctaatgataaatgacataaagcatcttttcaggcatattggccatttgcatatcttccttgagaaaatgtatgttcaatttttttccatttaaaaatttgatgattttaaattttattgttgagttgtaaggattcgttatatattctggatagtagacccttatcaaatatatgatttgtaaatattttctcccattttgtgaatcttttcactttcttgatagtgtccttggatgcacaaaagtttttagttgtgttgaaaaacagtttgtatatcttttcctttggttacttgtgctttatgtgcatatctaagaaactgtttctaatcctgggtcaggagacttacaactctgttttcctctaagagttttatagtttcagctcttatatttaggtctgattcatttagaattaatgacttgtatatggtgtgaggtagaggttcaaatctattcttctgcatgtggctatccagttgtccgagcactaaatgtttagtccattttcatccttccattttgtcttgtccaggctgttgaagtagcctcctcacagctctccctgctcttagctcttctccaccagagtccatctcccaccatactaccagttattcatcttatacacagatatgattatgtcctttccttaataaaaaaactttattctttccttagtttctataaaatagttcaaatattcaacataaaattccaggtcctatctagcatgacctcaacccacctcctaattttactgtgttccttctccccacttgctaccccatcccagccatccttgacttcttagctggtctctttctggcctgagtgagacatttggcctggatatatatgcatggtatggctttggttgcttactgtggcattggtgcttatgggatagccattgactttaattaatggggtgttatcagcacatttatcctattgaaatgactagaggaacccataagaaaccacattttcaggactagtaatctattttagcatcatttggaagacaacaaactttcattttatgggtagactaacattcacaaattatgacatatatcatataatcataatcattaagttatattttaaataatcaaccatccaccatcccaaactctaagactttgttggtaagttttgtatgtcacaggttcatatttttcacattctgacacctacattcaaggcctcaaactttaccagagactttttatcattgaggtaaaactagaagtcattaatttaaaaaattatattatttttaattatggtaaaaacataaaatatacattttaccatcttgattttttaaagcagtttactagtgttaagtatattcaacagatctccagagcttttcatcttgtaaaactgaaactgtaacccatttaccaacaactccttccccatttccttctcctcccaaggcctggcaaccaccattattctttctgtttctgtgaattttactactttagatacctcatataaatggagtcatatggtatttagcacaaggtcctcaaggttcatccatgttgcagcacatgacagggttttcttccttttcagggctgaataatactccattttgtctctatatcacatttttttgtttatccattgatctgttggtagacatttgtgttgcttccacttcttggctgttgtaaataatgctgctgtgaacacaggtgtgcaaatctctttgaggactctgctttcagttctttgggatatatacacagaagtgtatataggattaggattgcaggatcagatgataattattgttttaatttttcaacttatcttctcgaatgagaacactaaattaaatttgtggggtttgtgtcattttagacatagctcacgaagaagatggtaactttaaattgtccctgcaacaatgatgatgggcttcagtgattgtcttaaatgagtcatcattatttttgtgttttataaccaaccctatgcatctgaacacaaaagtcaaacctttttaatacctcaggtgtattttacaccaaaatacagggaaaaggcatcaatcaaagctgcttaacagctgatatgatagtgattacatgtgatatggtagttgagactgaaatgctatttgtaatacaaagattatcttaactgagtctgatttgaggtgaaaaaaggtactaattagggtgacaatatgaatttgatttaactttaaagtattatgagagaaaacatactatgtcacaactcttttatataacgaactgggatttaggtatggagtgggtagaatagtggtcaagagcagggattctggagtcaagtgtttggcaccaatcctggctctggccattgccagctgcatgagtgccactgggcaagcttctcacagcaccagatttttcatctgtaaaatacggttaataatggattgtggtggcattacatgaattaatatacgcaacatgccggaatgacatctggcagggaggaaaagccatataagattttgtaattgattttctagcacaagctatccattcttaggttgttgtatcttccttgtgtcatcccacatatcaatattgtcatctgcaaaaaatatacacgtatgtctcttttaactaatgattttaaaatgtggactaatcaatgatctaaaatcccccttccttttagtcaattagtagttcataaattgaagatgtgatggatagaacatttcgtacccagaaagctcttagattgtgaatgctgagggaacactgggagattcagtgagtgcagcacaaatacaatctaggtgactggaatagtttctaatgaatgaatcactgaataagcagatgggttgtggaaggcaaaccatgagtaaattttttcttttactacagaaatatttctgaaaggtaaatacccaggtttatgatgatagaccttctttaaactcatgctatttttctttctgggttttgttgtcaacacaatctcatctgctctttgcaaccattacctctcagaatgggtatgaagatcaggtgcaaccatgtatgtgataatgcttctaaaaactattttttttccagttttattgaaatatattttgcataaaaatataaaatccacccatttaaagtacaaagctcagtggttttcagtacattcacagagttgtgcgatcattgccacaattaattcctttctgtctccatggaatctaattttgaacattttatataaatagaacaatacaatatgcggtcttttgcgtctggcttatttcatttagtatagtgttttcaagggtcatttatattgcagcatgtatcagtacttcattctttttattgccaaataagacttcattgtatggatatgtactacattttattttctcattcatgagttgatgaacatttgggtttccacttttggctattacaaataaaattgctatgaacgtttgtgtgtgagtttttgtgtggacacacatctttaattctcttgagtatatgcctaatagagaaatttctgagtcatatggtaaccctatatttagcacttccaggaactgccaaatggctgtacgattttacattccaaccagcaatgtgtgagggctccaatttccctacactgtcatgtacacttgctattatctgttttgtcataatgggtatgaagtggtaaaactactgaaaaaagtgacatattcatggagtaaaagtaaaattgaaacatgcagaaagtattcttcaggcccagacagccccccagaattacagttttttttctagagtccttgaaagttgtctatgcacatatgacgtatccctagatatgtatttgcaagaacacatgtaggagtatactattttgtatcattctttatcacttaataatatacctaagagcaattgctatagaacaggttgacctgcctcattctttttactcttagcagagtattttttgtgacgatgtaccttcgttcgttttaacagcttttctaatgaagggcattttggttggttttgctcttataagtaatgccatgcgcatccacaagacatacaattgttcttgagtacatttgtgaagatattcacaggaaaaaacaagttatactgctatataccaccatcaacaggggatgagagtgcctattagcccacaatctttccagcttaacactgtgtgttatcagcctttcccatcttggccaatgtggtaggtaaaaaatagttcagtaaaagttgatttgacctataaggggcaaatcaagtttatgttataaagcttgaagttcaacattgaagttgaactccagataatatggttaaagctttcaaatttctgagaaatatgcaggcatagagattgtatctaaatttgccttaatacatagtatatccatttgctaattgaagaaggtgattggttcatttatttattcaactggcatttattcagcatttatcgtatgctaggtgaactttaagtgctagagagaaggatgaataagaaacatacattgcttacaagtaatatatagtctaataagggggacatatatatataaatcaataagcataatggacatgaaatagaggcaagtattatacaataagctgtgtatattaggccataggctaagctactgtgaaaaaaaaggaccctcaaatacttgggaaattgcttttgggaaaagacaaaaaaaaaaaaaaaagcttgtggaaaagggtgaaaagtggacatgagagtaaggagagtaagccatttttaaaataaaattttattttaacttcgattgtcatatggtaagtgtacatattcatgggataaaaatgaaaggttttgacacatgtgtgcattgtgtaatgatgaaatcagagtaattagcaaatccatcatctcaaacatttatcatttctttgtggtaaagcattcaaaatcctctcttctagttagtttgaaatatacgatgcattattgttagccacagtcaccctgctgtgcaatggaacaccagaactgattcctctcacctaactgcaactttgtaccagttgatcaacctctccccatagccatttcctcttaagcaagaaacatggaaattgtacacattacttctgaaaatacactggcaagccacttctagttgcagggtagacttggaaaatgaagtctaactgggtgaccctgtgcctccacattattctggaggaaggggatcacggagctagggtccccagtctgggaggctggtagagaggcagctcgctgtgctactctgatatttttagctccgtgggggaaaaagaactgctagacagagctctgtcaacacagatctgacaatctcattcagaaacaagttacagagacctcaagtgattaataaacaagattattctatagaacatcttatggtgacataatcaatatgatttcaacactcagctaataaatgctatgaaatacaatttatgtaaggtgttaattgacatgtcaggttttaaatacaaaaggaatgagggagggagacatgaatatagatgggtgttatcagagaatgacacttagatacatttcatattgtgtcatgtaaactaatacctactttttgggatatttcttcatggtttagtttttaatgtagattcaagagttttatatattcaaactcttcatgaaaaaaattcagctctggttatgtacatccacatttacaggaattgaatttttctttttgtacacttgtgagtatattttttcctatggcaaacgttttccagaaagcaaaagttatttgtgttactgtccctgataatcgatgctgtgtaataaatcgttctcagcaatggcagtttggacactgatggacagttggtgactggtaatttgtacagtatgtttagtgggacggcgggcaagggggaaaagtggcatttggttcctcagtcccagatttgggtcaatgttctcataatactggtgagcaaggagcctaattctttaggaattttaaaaggtttcttttagtgaagaacatttcccaggtgtctaatgaaaaattataaatgaccaggtataattttgccaagctttccaacatagttttcctttagggtgagaaacaatcctttgattttcttgaagtagaagtctcttctcgaatgctaacagtaaaacaagaccttttcagacagattttgtattttgccatcaaatgtgcaatttttgaagatacgggacttgagaatcaggtaaacttcgttctgaaaaccaggcttaattttatgactgtgattagaaagttgaaaaaaaaatcacgttctcacaaatgaaaacaaaagtcagagttcaaactgtttatcctgtttctgtaagcttttgtttcagaaggccaaggattatttgaggagaacctggaaaattaactcaaatggaggaaaaaaatggcgtttatgcaaaatgcagcaaaagcagacagccttggagaactgaagcttaaatagcgtaagagtctgagtactagtcttcagatacttaaaacagcatttgatagacaagttagatatttaaggaaacatttaatcagcttggcatcagcattagtggcttcaatttttggctgagcctgactttgccatatgatcctagacaaatttgcctaaaatgggtgatattaacttctttagggaaaggctctgtactgggatttttttgaggcctatgatttatggggtcaagctataaaacaggaggaaacacatgctcatttgtataatttttacatatatttggtccataattgtacagctaggcaattcatttattatctgtttgagagtaaaagtttgattattttaatgttactacttctggttttttctcttctcacatgttcccagtgactcctttctgataacccaacttatcatcatagaacgcatgtaatgctgagaataagacacagggtcttggaaaatgaatgacagcaatggtgctccgatggcagttttgtcagactttgaatggtttatgaaatcactgttgataaaagtgaacaccttctactgaagggagaaatttaggggggaaaaatcccaaatagaaggagttaatatccaaacctggagacttacctggtaaggttcacttaactggtaaaatgtgatccaatttaaacaaagtatttttagttttctcagaacaaacatcctacataaacacaaaaaatgatatgagacatagatataacttggttcacaatattttccaaaactataatgtaccagccagttggtacagcacaccaggagagaagatcattattaatgtgctaatagcagcattttattttgaaacccactctgcatggttacagggctcaaaacaacatattctaacaggaagatacattaccgaaatattttaatgagaatatttaatatgcattgagaggtccgcattttcttgcagagaccttgtaggtagctctttgagatttctgtctctatgcatttaagtgaaggagttggttgggtattttagttggcaaattttgcagacatgtagctttggtagtggagaggtaatagtaccatgccctgcgtgctggcgaggaagccccacagcaacagtggcttttagcagctaccagatttgctaaaagcagccatgtccaattagcagtaagtgccatgcacctgcagttactaggaattgaacctcttttgaggctgaatcttaatgtagccttttaaaaaaatagcaaaaatcttactcatactctgagataataaagaaaaattagcaatggcaaaatggacgcactctgaaatgtattcttaataatgatttagaatatggggtaaatgtagaggcaatgacacatttaaactgcattatttttaaatactgttttatcagtttacttcctaattttgaattcaattttcatatctatactgcaactgctttttttttttttttttagaaatctataatattgctgcaggctccctatgtatgtttccataattttctgcaaagtgttttcaccagaataaaaaaaaattacagttcaaaattgcaaaactgtagaaaaaatatgctctttgacttcttttctatgtgtcaaattcaccacaatggaaaggactacactatagaattaaaacgttattttcaacagatagtacttattttaacatgtgttcagcatttaaaaatatttaatattcttttctaaaaatgcttacattcagaaactatttatgagggttctgagcagtatgatgtttctttctctgatttactgctttttctcttttagaggatattgtaggagaaaaacatttgttaagcaatttccagaactactaggttctaataagaccaataggctaataattcatttcattgcaactggagtgtgtacttttcctttattctcagtcataattttttaaaagagccaagaacaccaaatcatcaaatctaatgttgaacatgtagtaacttttatttgctgatcatactctgagattcaccataacgaataaatcataagtattaaaatttcagctttttaacatacccactacactgctagcctggtaacacagtcaccaactacacagcttcttcaactgttgacgtgctttaaagctaggattatggtatcctgccaaaaagatcctacaaactgtcactattttggtttgtcctgccagccattgagaagtagacaatttctatatacacaaaccagtttggaaaatttatgcaaataggaagttattctcaaaatgggttatttgattgcattttttttttttttttttgagacaaggtctgactctcgcccaggctggagtgcagtggcgtgatcttggctcactgcaacctccacctccgtggttcaagcgattctcctgcctcaatctcctgagtagctgggaatacaggtgcatgccaccactcctggctaatttttgtatttttagtagaggcaaggtttcaccgtgttgactagggtggtctcaaactcctggcctcaagtgatccacccacgttggcctcccaaagtgctgggattacaggcataagccaccgtgcccagcctgattgtgttttaatgtattggctcccaaccagtagcaacagtttgggtgcacagatattgccgtagtgtttctattcaatgtgtcaaattatttaggtaaaagtttggcttaactttgttgacatggaatttctatatcctccagtttctggtttaactggtttatgtggaaatgaatggaaacacatggttaagttccccagcctccagcttctctcttcctcttacctatatttgtacttgcccacttttcctcttgtgggcctgttcctagaatccattatgttctgtgggtgacatcagcctgctactgcgggaagaaatagaattttatggtgcccaagataaaatcgactatgatgatgcagaatgaagacctggagaggagtcagagattgcaggggataaaaagagagaaatcagagatgctcccacaaacagagaaaaccttcagaagcagcaggaaggacagagtaaatggagaacaaaaactcaagtcaaaatagtcaatggaaataaacagttttgaattccagttataatttggaaaagaagcaaacgtttattttaaattaagaaaaaagtcgcttataatttcctgaagtttagaaaagtgaaaaatagttaaacctcctgttgttagctaagaagtgtctattattataagtttgttgctggagagaacataaaaatctctatctattgctattttttttttttttgcataagggatggataaaagagtgtttattttatttagcctttggcctgtaaagtaagatttatgaaacaaaggacaatcggaaatgataagaattttttcctaatttctaattatttagctaaaccttgattgatttctctcaggctagtgcccatattacagcagcagtcagccttcatttatcttacctgggaccactgctaaatccgatgtcacttttcagtttttatattatgtgaccatttagccacatttcacctacttgatcattccctccatcttgagacctccctcgacccggcttccaacatactttgccctcctggtttttctttctctgttggctcactttctcagtctcctctgctggttgctccatttttccacaatctctcaaaactggtgctcctcagattaagtccttggacttctctccttagattgacatctggagtcatggcttcaaacaccacctatcactccctttctccttgaactctagacgtgtccatccaactgctacgtgacatctccactgggatttctaagaactttgccaaacttaacatgtctaaaaccaaattctgggctgggggtggtggctcacgcctgtaatcccagcactttaggaggctgaggtgggcagactacttgagcccaggagttcgagaccagtctggccaatagagaaaagctgtctctacaaaaaatacaacacttagctggacgtgatggtgcatgcctgtagtcccagttactggggaggctgaggcgggaggattgcttgagcctgagaagttgattctgcagtaagctatgattacaccactacattccagcctgggtgacagagtgagaccctgcctcaaaaaaaaaaaacaaaaaccaaaaccaaaaccaaaaaaaaaaagcaaagagcaaaacacaaaaaacatattccaaatctcccctttaaacctcctcttcttacaatgagtcctatcttgatttatggcagatccttccttccagttctcaagccaaacaccatggggtcattcttgactcctctcttccatgggctcatctaaacatcagagtatcctgttggctatctggaatttaaccacttcctatcactgccattgctacccacctgctcttagttatcaccagagttccctggagtgttggagccgccgcagagctggtttccctgctcctgcctttcctgcccatgctctgtcctgccagtcagctctgtcctttaaaaatggaaatcaggttacctcatgactcttttctttctttttcttttctttttttttttacagaatcttgctctgtcatccagcctggagagcagtggcatgatctctactcactgcaacttccgcctcccagattcaagtgattctcctgtctcagcctcttaagtagctgggattataggtgccagccaccatgcccagctactttttgtatttttagtagcgaaggggtttcgccatgttggccaggctggtcttgaactcctgacctcaggtgatctgcccgcttcagcctcccgaagtgctgggattacaggtgtgagccaccgcgcccagccatgactcttttcaaaaactccccatcttctccacttccattcagtaacagtcagatctgcatggccccctcctgaccttctgatgtcatgttctttgctaccccttgagtgcattgaacatgcctctgacccagaacttttctgtttgctatttcctcaagtgcatatcttgttccttcattttcttcaggtgattattaaaatttcacttccatgagtccttccctggcccccatatttaacactgcatcttcctccatcttctttccctcctccccatgtacattttactcccttactaaattttttttcctatctcactttcttttctttttgagacagagtattactctgtcacttaggctggagcgcagtggcgcaatcttggctcactgcaacctccacctcctgggttcaagcaattctcctgcctcggcctcccgagtagctgggattagaggcgcgtgccaccatgcctggctaatttttgtatttttagtagagacagggtttcatcacgttggtcgggctggtctccaactcctgaccttggcttcccaaagtgctggtattactttctaacctcctgtgtatgctacctatttatttgtctgtctctctacactagaatataagctctatgagggtagacttctttgttttgtccaatgctctatttccaatatttataaccgtactggccggtaggtactgtcaattatagtttttgaataaattgagagtaacaaattctaactggtgaaaataaattaaatgggccgggcgtgatggctcacgcctgtaatcccagcactttgggaggccgaggcgggcagatcacttgaggtcaggagttcaagaccagcctgggcaacatggtgaaaccccgtctctattaaaaatacaaaaattagctgggtgtggtggtgcatgcctgtaatcccagctactcgggaggctgaggcacaagaatcgcttgaaccctggaggcgaaggttgcagtgagccggcattgagccactgcactccagcctgggcgacagagcgagactctgtctcaaaataaataaataaaataaaaattaaaaagaaaataaatgatctcacaggatatcatttcttgattggaggaggagagaaaaatgtgtatgtgtgagggtacagagagagttcctttgcattagtgagggttcacatcagaactgtctaacctccctactcagtgggtcctgttacctctctcctgaatccaataatactctggtgcacaccttttactggtactgaggctattttaacgttccattaaaaaaaaaaagaaaacatttaaaatacaaaaacaaggctgtactactttaactctgaccttagaagactctcagttttataactgtttagagaaaatgtggaaatgtttgctggccccaatctttttattactcatctctataaagaggcttttaaggacatattaaaaagtttccatctctcttgtctcttgcctttcttctcatcttcctttcttgtaccccaaatggctgaaagcaagaccctgagagtctggaagaaatatattctggtcagagcagactgagctggagctggcctagaaccttggatcctgacctcagaattgctgctcaaattactgctctctgaaagagtgagctcatgcatgtttattattactgtgaacaaatttagctgttgtttcacccaaacattgaagttctcgcttggacccctttgcttgtttgtgcttttgcaaatgtgttttctcatgtgctactagaaccaagatgaaagcttcagttctcagaacaggtgccacgaccgaggagacaaaacaagagctatagaggggtgtggtgtgtgaaactgagaaagcaggtagtttttcagaaaaactgagagccaggaatgacttcatccatttcctgtaataaggcaatggtctgaccttgaggaacctattagagtgtgcttctaaacagaggccatttcgaggctgaatgtacgggagtatttacctttgactgttttctgaagcaaggtattttataaactgtaaagtggcttatacaattttaggaatggaaagttttgcaaagtctccaaaatccctgggagttttgaatgtgcaggccatatgaattctttgtagtttcatggtcttgctgttcagcattctttagagtcacctgcatggtagaagtttagtaggaatttgggtagttatgggctggtttctttgttttcccaaatagaggtagcaaaatggatgctaagaagcaaattacttttactattttagatgcctctggggacatcctgtcataatgcaacttaaaatatactcgtctcctcagttcctttttatgtatttatttaatagtcttcaaccaatttgttcttcattagctgttctacaatacttcaagagaagtcatgataatgatgcatttaggatcagaaaaatatagcatgtgtgagttcctggggactttagagaatatctagcccagtctttcattttatagaagaggaaggccagggatggtggctcatgcctgtaatcccagcactttgggaggccaaagtgggcggatcacctgaggtcaggagttcgagaccagcctggccaacatggtgaaaccgcatctctactaaaactacaaaaattaggcaggcctggtggtgggtgcctgtaatcccagctactcaggaggctgaggcaggagaattgcttgaaccaggcagaggttgcagtgagccaatatcatgccactgcactccagcctgggcaacagagtgagactctgtctcaaattaaaaaaaaaaaaaaaagaagaaggagaggaagctgggggtgaggacaggcagtgactcacccagggtctcacactgatttgctggcagagttaagcatgaaaaggtgcctctcctagtctctttccagtgttcttgtcatcacaatgagttaaaataaaaattactagcaacttgggagtaataacaataaacttctcaaaatctactacatggtctagaaaaccaaacataaggccggacgcagtggctcacgcctgtaatcccagcactttgggaggccaaggcaggcggatcaggaggtcaagagatcaagacaatcctggccaacatggtgacactctgtctctactaaaaccacagaaattagctgggtgtggtggtgcgtgcctgtagtcccagctactcaagaggctgaggcaggagaattgcttgaacacgggaggcagaggttgcagtgagccgagatcatgccactgcactccagcatggcgactggactctgtctcaaaaaaaaaaaaaaaaaaaaagaaaaccaaacataaaaccagaatattcctgtgagttccattacataggacaatatggtcctgctgatctattaaaattatgtttataaattagaggctcttcattgggagatatacttaatgctagatgacgagttagtgggtgcagcgcaccagcatggcacatgtatacatatgtaactaacctgcacattgtgcacatgtaccctaaaacttaaagtataataataataataataaaaaaagaataacaggaaaaataattagaggctctttactgtatttaaggtgttcaaataattgaagctagtttagtatctccttagccttccccagcatgccctgcagctttgacgctgcagaacaccagttggtggctgatatttagatgatggaaatcttggacacattttcatttttgataaaatgacatggcactatggttacattttacaaatatttttgcggatgtatatcaggtggcatacccaagaaggaacagaccttcctcaggggtccttcttaggaaagtacagctttgcttctctgatcatcagaattggatccttcaggtattaggttggtgcaaaagtaactgcggtttttgccattcaaagtaatggcacctgaaagggttggtaaaattcagaatattataaaatcagtaaaagcttaatcaaatttgcctaaatctatcctacagattagtctatgcatggtttattaaacaacctaactgaaacacacatgcatatgtgtgagtaagctgacatcagggatcaccttatcatggaaaatctagggaaggttggctcaatcttcaatttgtgaagaccaattcccctaccacgtccatatatacatattcccaggagacttgtttcttcagggctctctttggttctcagctcttcctttctgaattagtgggtcactttaacctcccttgggtcacagtcgtgttccacactgggtgggtccagaggtagaactcattgcctttctttgaatcccacacaagaccacccaacaaggcattgtagttggtggaaaactccattgaagaaagggtctatattgcaacaaacaagcatctagaaatagaatattaaatatccctcctcttaaaaatccattgtccaattcagacttcagcataatgtaatcttctgtcttcttttctctgtgtttccatcttgagagccatcctattatctgtgtcctttctttgttgtcttaggaagaatattttggcttatcctttgttttgttctctccttcccggacctattatggtaaatgtggaatttgcagataggcttatttgcgctccccagcctgctcccttaatgctctctggtaagacacttctttgagtcctccgaggcgagttgctgccccccagcacctgctcttccccatcgcaacccatgacagtaaacgcactgcacatacttatcccacagactgctgtgagaactagatggaggctatgtgtgaagctgcaagctcttggtaaagtgctacagaaattggtagacactgttactatgataagatgttcagaaaataatggatcgattaaagtttcacttatctattaaaagataaaaaactctatgattgagacctttttggaatattggaaaatatttttgtgtgcttattagcatactgatatgtttcagtacacatttcatggatttatggctaaggatgttactttcaagaaggtaactatacatcgctctctactagcatgctgttctgttcctgagaaatagtggctgggcgaagggtatgcaaacatttcttaatatctcatccaataccattttcccactactaattattcaacacatggaaatgtaggtcaaagcattaaaaaaaaaaactagaacagcaataccttggtggttggcaggtgtttatttaaaatatttacgttttagccttattttttaatacttctttttcatatatattagatatttaactaaagaaaataataatcattctcatggaatactttaaaatagtagaaacaatcatgaatagaaatgaagatttaggcctatactaccctaggctctgtcattcttattcctaaccatttgcataggaaatttagattcacccacttctctttcttagaataagattcacaggtttttgggcatattcccattgcatgcctgactggggaggtgttcaaatccctgcttttctactcctcagccctgtgaccctgagcaatttctgtggcttggtttcctcatctgtaaaataggatattaatagaacatatccctttaacgttgcagtgatcacattaattagttgatgcaaaacagtccatctagaacagtaagccctcaataaatgctagctatcattatcatttcatagccagccccaccatggatgggtcatgtgacctgaagcaaatttaaattctctggatttcagttatctctcattgaaggaattaggctccatcagtggttctcaaactcaagtgagtatcagaatcacagggagggtgtgttatgacactgaaggccgggccccaccctcagaatttcttattcagtagatccaggagggagtgcaataatttgtatttctaaaaagctcccaagtgaagttgatggctgatctggagacacaccttgaaattcttctgcttactctaaacaaaacgtgcttttttatcttgagtgcacatcagaaccctctggggaggttaaaagtcccagtgaaatcacaacctctgcagatggtaaccagatcttagtggcttttaaagttctccaggtgcttccattgagcagctaaggttgacaacacttctaacaccgctttcaggtgaaaaagaactatcattctaacttaaatgaaggagaaaatgaattcatcattctgacaccgttatctattctttcatgcatgggcttatcctatgagaaataaacatttactaaggtgtatgcatgtttttagaacatccattgggaagcatgttgtacagcttgtagtaaaacagcatggtgcatgctgaaactgttataggctttgcaagttattttttataaattagttttgctggtgtgctgtttgattattggagagtggtgtgaacatgtttctatgcatcccagggggttgctgtcacctttaaggggcctctttaaatcccagctctttcatttacaaattctatgaccttggatgagtttcttcacttttctgtgccacaagttctcagtaaaatggagataattatagaacttacttcatagagctttgagaatcatacaggtaaagttattttacgtaattagcactcaaaagtgaccattaataatctaacgttttaaaatatattaataggccagatgcagtggctcacacctgtaatttcagcactttgggaggctgaagtgggtggatcacttgaggtcaggggttcaaagccagcctggccaacatggcgaaactccgtccctactaaaactgtaaaaattagctgggcatagtggcgtgtgtctgtagtcccagctattcaggaggctgaggcaggaaaatcgcagtgagccgagatcacgccactgcactctagcctgggtgacagagtgggactccatctcaaaaacaaacaaacaaacaaaaattaatagtttaaatatttttaatatatttcaatatataaagatgtaatttttattttaaatatattaaaatagataagtttaaaatacataaagtaaatatataaaattaatatgttaaaatgtttactgaaagtttacatttttctctgtattgctaagagcaatttattgccttatatgttgtgtaatatctagaaaacacacctatgtaatttccaaattataaccaccttggctcctggacaagtaggactgtgtctgatttttttttttgcatccttgtcactacctgccactctgagatcacttgttgtctttccatatataatcacctctaggtacacttctttcattatttctacgcatcctctccactttgctgcattcttgtgtgcattcttttctcccacgttggaaagaaatatgcatattgagcgattccaacccccaaaggcaaaaattactagccagtgttgaaaatgaaagcaaggaattttttggttattgttgctgtaactttttgatgtgcgtacatatgtgcgtcttttttttccccctaggggtggaatggggtggtgttagtcagggattactgacaggacggtgttgcctactgtgttggagagactaagactggggaaagattctccaaggctgggaaatgcagacgtccagtcttggaaaacagtttgtcgttggtcgttatgtcagaagaggagtgtattcctggaagaaggcccacaaaatatacccagagcccaggtgcctttctaagacgaatcaacattcactcacaagttcagctaatatatgacagaaatacaagaatgaacaagactcctgacttaagcttacagctgatgggaaacttgggaactggacagagaattaaaatacaacgtggttaggtacaacttacctgcgccagaggagtgacggaaggccttggacggggagtgatgcctggaggatgacagggcgacaggtaagttagggggctgggaaggggaagggcggccctgtgggtaaagggaaggaggttaaagtcagcagggaaacaggcagttccctgttgctggagcaaagcgcgggggtgtggctctcctgtctctggctttgctgtcaacaggcgagattggcaagtagggcgaccaaccggcctggtttgctcgggaccggggtttcctggaaggtgggactttcaatgctaaaactgggacagtcctgggcaaacaaatcagtacggttggccaccctatctttgtgtgggcatctgctaactgagtcatgggcctgtctggtttatttatttattttttttctgcctgagtaacagaagaatgtgttaaacatatggagtatggaagaagaaggagaggggagataggatttttatgttatagattggaagaagacatccttgatgaaggagatgtttttactttggagaaggactgcctcagccgcgaaagaccaaggggtggcaccacagggagaagtctgcactgcgcttgtcaggacggccagtggggggctgctgagcgcagggagtcagtcctcgcaatgaagatatagtctcggggagataatgctggaaatcgatggaagaagtggaacaggacacaaatttagtggaatttctttacaatgtgtgcttcttgtcaccagttcgttaaccatgataaaaacggttatgttgttacattcatcaagatccaaattttctaccattttaagatgtctatcagtcacaatgatgatcactgaagaccgaacgagatcatttcctctaaaaattatgttacatttatccataatggcatcagtgtctgttacacgtttgctttaattttgaggtcaaatacgacatttgtaaatctagcacttcatgtgattctgtaagcactaaacagctaaacatatttacttcttttttttgaatcaattagaacagtgctgtacaatagaaaaatagaacagtgctgtacaatggaaacagtgctgtacaacagaaatctgtcagccacacgtgtcgtttaaacttttctagtaatcacattaaaattgtaaaaagaagccaataaaagtaattttaataatatattttgtttgacataatatagctaaatatcaattttgacatgttctaaatataacaattattaatgaaaaatattacattcttttggctttgtactaaacatttgaaatgtggtgtacgtttttcacttatagcacacgcaattcagatgctacatttttattaggaatatttaatctgtagatagatatcgtaaaatttacatttgaaaaaaatagattcagacacctaagttgttacaagcatacttaaaagttttcaatgactgaattgagtatcagttttaaaatttaaatcaatgaaattaattaaaatgaaatgaaaatttagaaactattcctcagtcacgctggctacatttcaagtgcttcatagccacatgaaagctgtattggacagcaaagaagtagaatatatttggaataaaaattttaaagtggacacattgtgttactctcgttagccatgctattgctattttttttcctatagctaattaaaaccttaagatccagtaggttctccacctttttttaaagcattagttccatgtcgaccctgtagatggcagcactttcttcctaaaactacatggaggagttgcctgggcttgtcactcagattctggcacttttcatagaaagagtctgaattatctggaaaattctttggtaacataggtcagaatcttttcagctctattgttattctgcacagatggctgttgcttatgaaaacaatctctcagcctctagtccaggatattactcattcctcagttcaagaaactctagggtgagaggagaaaggggttcaattacagaactgttatcaaaatgcgttggtttatgcacatccgtgttttggacatggtgattccaagagactcttaataaaacttttcaaagtagatgagagacagtttttccctcacatgctgtggcaatattaatctatgttttcatgttccactggactttgtaattgaattttaaggaatgcatacagggcttcatatttatatataaaatatccatatccagtgttgaaagaaattaacaataaaatatgtacctgtataaaatttgtgatttttgaagcacccctctcttcctcttcgcattgcatttgtggtaggagaacatgagacaaggaacgaggtactaaggacaaagaaggagcgattcagaggtggatttcctgaagaccaacaacatttttgcatagctcgtgaggactctctgatactaaactccaataaatgatggtttggtgttttgattgcttttgattgacatttaaaaattacaggagactgagataggaggattgcttgagcctgggaagcggaggttgcagtgagccaagattgcaccactgcactccaacctgggtgatcgagtgagaccccatttcaaaacaaacaaaaaaataaaaaataaaaaaaaacaaataaaaatcacacgcctctttttttcactcaatctgttttccaaataaaatatcaagattctatttgaattttaataatgattttgctgagttttatagcttgaatactatggcaagtataatgtctaaaatgctgtgattttgacttaagaaaaaatttacagttttcttaatatactctttagttcttttaaactctaatacatgaaatggattgctaatgagggtaggaagggggaaagactggggagaaaaatagctaacttttctagcgatagatacatgtcagaagctgtagtaggttcttttgcatgtgtttacttacattaccttctgtaatctgcattgcaattttttcatagacaaggaaacctagacttagagaagtacaatacctgtcatctcgtaaatgacagatatagttgagcaaatctactgaaatggtttagcttcttatctttccagacaacagataaggacttattctatatgaagacatctgagaaatgaaaatatggtttcaggttcatagaatcttttacaccacgtatttctggttctctttcttctattcagatcattctttcatctgtttcttttgtcttcttttccaaaatgtagcaattgccccaaattcagtacttgtctctcttcttaacaatcacatccaatcccatggcctcaaccatcttcccttgcatataatttccacatttacaactttattctcttgattactcaggataagataattgctgaacaaataacagcatatatctcagcttaagagagtaaaagtttatttttctctcatgcaaattctattgcagatattccccacctccttccctaggttgtcctcaaaatgcagtgactcagggaactcctctttctgtcttaacctattttaggtcttagacccctttggcagtctggtgaagccaataaatctcctctcaggacagtttctaaatgtgataaaagaaaaaaaagatatagtgacagatctaataattaaaattcaaagttaatttcaaattagtgataggtaaatatatttcaagatgtctgcactgaatacagcgtgataggtaatatatatgatttatcttggtgacaaagacattggtattgctaacactattatagctgccatctgtattcacaaagggagatgtcaaattccagttaaaagaaagattttcttaacccaagttcataggacttcctgaatggtacagatgctaaggtctagtggctccacaactaccaaagccttcttagtgttctctgctggatcttatgcatccaattgactgacaagcaaagaacctgcagaataataggagacatttgttgggtggggagagcaaacctagaaggggcatataccccttacaattatagctctatgcgctagaattagttatatcattcctcctagatatgaggggactaggcactgtacttcagctgtgtgtccaggaaaaaggtaaggtatggggaatgtggagcaataattatttgaagcaagaatcaccagtggatgctaaaattcgtgagggaaaacaggaccagaaacaggatatttttaaagtctccaagtacctccacataggatacttattaattgcaaagggaaaatagtaactttacagagaagaagaaatctggcagacactaccatatccaagtgatcaaaggtgacatcagtagtgggacacattaacatcatgtgcttctgatatgatacacaaaggagaaacaacctcattcttgtgatgttcctgccaaaaatccataacctgaaagaagcatcacaaaatccccaattgaggggcattccacaaaatagctggctagaactcttcaaaattgtcaaggtcatgaacagttccagaccaaaggaggctaaaagagacaggatgcctcaatgcaagtataatcctgaattgggtcttgggtcagaaaatgggcattagtaagacaattggcaaaatttgaataaggtcaatagatttgaaaataatactgtacctatgtgaatttcctgactttgatcaaagcactggggttaagttaaaacataagatgttgtttttggaaatacatgctgctatatgcaacttactctcaaacatctcagaaaaaaaaatagataagttcatagatagatagatgacaggataataaagcaagtgtgataaaatgttagcatttggggaatgtaggtaaaagtatatgggaatattttgtaccattttctcaacctttcctttaactcgtaaattacttaaaagaaaagcaataaccctggctcttataaaactaaggaaaatggtccatcctttcctgtgccttgtgttttcctgctggtcaaagaacctttggtaatgacaatctgagttggtcactgatattctagtaaattcagaatataacttcctgggctatgtagaaaaatatagctcttcatattttaattcattttcctgacagcacgtttctgtgcttttatgtatggatactgcctagtaatgtgcacaccagtcctgcagatcctggaacattttattatcttgatattgacttacgtatttaggtagatctgaatagcagaattgtcagtcgtttcaccaagacattatcgggaaatctggacttggaagtctacttctgccaggcatctctccacgctggcttctgggccacagaagaaaagatctaatcaaactcatttattaacaaaggcttataatattgaatagcagcttccaggaatctaagaaaatgttcacttttatttctgactaaggaggaactattatagtctttttataccagttagaagtgatgacttggtattaaacttattctaattctcaatagccctgatctcgactctgaccacatgcgcgcacaccctcccccaaccctgtaagtgtgattatggcaaggggaaagttaaagtggagtgaatggtgagtcgtggaatgacagagagcatttagcatttgtaattgacagagttggtgattgactgaatggacactgaatatctaggctaaaagtaattgaatgtggatggtgtagtgagatggagaacactagcaggaagatagactgggctacgcaggggctagatcatgtgttcagtctgggatatactaagtttgaggtttctgtaaaatgtccatgtgaagatgtccaattgggagttggatatttatttatgtttccattcccatcaatcgataagcttcagaggaaataagagtgtaagatttttttgaacaacaggaaaggaagattgtagtaagatatgatggcataatggtatatggaagagttttaaataaaagttagccaggcatggtggcacgcgtctgcagtcccggctactcgggaaactgaggcaggagaatcgcttgaatccgggaggtgaaggttgcagtgagccaagatcgcaccactgcattccggcctgggcgacagagtgagactccatctcaaaaaaaaaaaaaaagggatgaagagggatgaggagaactcaagttatattagcctgaatggaatagatgagtggagagatgggcatgataggtgagttaagaaggaaattctttgcctcagcaaccaactcagatgctttgtgaatctaaattatgtgttgacattctagtagacctagacctgggataattcacttcagcattatgtaatcttaatttttcatttataaataagaaaatattatgcaatacttgccatagttttctaaaagctgaactcagaatgttaatgaaattaaaatgggaaagctattttgcttagaagatattttgttataaacatttcttaaatgaagaggctctagaaatatttattttatagaatttaaaatatagccatcactaataaaggcaggcataattccaacgatttcataacacatcagttattaaatctaattaatatataaatgtaactaatatgtaatttaatataaccctaattcaatgtttaaccaactgaagctggttaaactatgaagaagaatcttcaaattgaccatttctttccaagcggtaaaggtgatacgggattttgtctatacatatagagcaaaggagaattaagccaagatttagaattttaggcaaaaagtgtttatagtatcattaagtggttacatatgtaattttactgttataaatatgactgagtcaatttttttttcaaagattttgtcacaatgggaggcacaaggagtttagacagatgaagactctttctagaaatctacctaatctatcacattagacctggagataattggtttgacaatttcagttgtttctcagcaaaaaaaataagaaactaaaagtgttcagatggcagagaaaaaagtttgaagaggagagaaagaagaacaaaaagaaaaaggaaacagtagacatataaagaaagcacctaaaccagtgagatgccccagctatgcaccagcagcatggtggattacagtagagtttttctacagaactattgtaaatcactggaaaatagtgtccaacttatttgcttaaaattttcagttaatgtgctccagcagcattctgtagacaacgactctcactctccccttattatggaggcagagctgtttctctttgtcccgttctctagcctgtgatatactttttattgctcaagagctatagaattgtatccatgcctattgttgtcctcctgatgggaattcatgtaattgaaagcgtttatcctctcttagtagaaaaattgggcacttggaggcaatgaaaatcccccacctttgtccacggcactggaaatactcttcagtctgctttgttctaaagtttctacttttcccagtataacctgttgaaaatttagtccttcatgagaaatacggctggaatttcttgtggcaggctggccgccggtgttcatgtagttacaccttttgttgctatttcaccactgatcaaaaaataaaattgtattttttcaaaagaaacatggaatgacatgaagaaagtccttaatatatcatggagtgaaaaacagcaagttgccatgcaaatgtcaaatagatcctatatttttaaataagcaactgcatatgtatcatttaaatatatatgtttagatatttgctaaattatgaaccgcagttacccctggggagtgaggttaggaaaagtaaagtgagattttcactttttacattatactttttactttacccacttctgtattgtttgaatctttaaaatgaacaagtgttattttgtaattaaaaaaaacaacaactgacaaataactatggggagtaagaaattacttggaatggaatatgtttaaataattaatttgttgatacactgcttgactattattttcttttgctaaatcaaaactcccctgcttttctcaggaggttgttttgaaaagaagggtaaatgtttctaatgaaatgaacagctcaaccttcccacctcctgcctaaatgcctcattttggttttgttactaacaaatgcaacacgcaaggctttatggtaaagcaagcaatgtgggtttctaacagggcagtacacacccgtagttgctgggaaaccactttagtaatggtggatttattgaattggaacaggaatggagatttggaacaacaggaagtgaggtacctgtaggggtctcagttgtcctgggcactgtgacatggcacccaaatgtcatgcaagagtggcccttccaacatatgcaccaatctgaatctctccaaagtttcttgattacaccataaaacaatgaagagaacagcattgccaataacttcagtaataacttttgcatcatattacaaagggtggtgggtggcactttgtgtggtcatgggtatgtccaaaagaagggagtggtggctagactcagttctcctttagattttaaggcaaaatttagcaaactctatggcagattcttcaactatttgtcagacagacattgtctacttttctggggatttatgattgaggccccttttgaggggagctttgagtgcagtgaggccagatagaagggccaagaaggatgggagcagctgcatgctagtgagcaattcaaagttggattgtgctgactggaaaatcccggttagcaaatcaactatcacagacttcatattcttttcagatgtgcagcctttataacatatttgtaaatgctaaaggactgctccacagggaggttacaaagagaaaagctctgggtggttgtaaaatggacaaattgtaaagccttactagtagtcttaccattcctctcagctcataaaaaagtcctcctcttcatttgactatgcctcaaatctactgcttcttggattattaaacactcttttcctccaggatcttaaaatctctctgttataagttgaattgtgtccccctcaaaaatgatatgttgaggtcttaaaccccagtatcctagaatgtggccttatttggaggtggggtctttacagggttaatggaattaaaacaaggccactagggttggccagtcctttttataaggaatccagtatgactggtgtccttattaaaagggaaaatttggacagagacacacacatagggagaaagacgtgatgatgaaggcagagtggggggtgatgcttctataagccaacgaaccccaaagattgccagcaaacccccagaagctacagagaagcatgcaacagattttctatcacagccctcaaacagaaccaaccctgccaatgctttgattttggacttttagcccctggaactgtgagacaatacatttttgatgtttaagccacccactttgcggtgctttgttccagcaaccttgggaaatgattacactttctcatctgtgatcacagtgaggccttgtcacaatcttcactcattccttctatagaaagctgaaagcctatggacaaggataattgccttggctgacgcatatgtttgaaggcagctgctggcaggcaaccggagactttaccctggtcctagtggagaggaagtctataggaggaggcagggagccttcctggctggcaacccagtgactcaggttgttttcttactccaaggatctctgtgcaagtaggaatcctgacatcttctctttttcacttgtttatgagaccctgcttgttgtagagtaaagagcagaacttaagaatggaatctaatcaccttgaaagaataatctctcatctcctctggtggcaaaggattgggatgtggaggttatagttggaaaattgattcctaggtcaatgtctgtgggtgaatttctctttgaattgttatcagcaatgttatggtgttcggtggctttcaacgaaataaacacacctgacatccttagtaaagagaaagctttctgaaataagagtgagggacagactgggacatgatgctttgcatgaaataggtgttcagtaagtatttgtagagttggaagaagttagattaaacagggctattgtatggcacattgtcattagggagttagagagggcttctggaaaggtttggtcagttttgacttaccttgcaataaatttggactataataaccatttcactagtttgtaaaaggtactggcaaccaaagatggggaatgccactcaatctcacttgttctactttcaaaagcttgctttggtcacattgaaaggttccatttggtgaagtatagcatatcacagaaaacaatggagtttgggagttcgggaacaaatggttgttttgtgataatgaataactttgacatttcgtttgaagttaagttatgttgtttgaacttttctgtccctgaacaaggcatcgtatgccaagaacaggtaacagtttctggatcactggggactcattagtcatggatggttagtggtactacattgtggtcttccttcaatattgaaagctgtaagaagcttgtgacaaattcttaccttggccctcacacagtactggtagggctgggatgttattgcttttgtccaccaacttccaactgtagaagtctaggatgatcacagcagttagagatgatccatttagatagtctatattaagggaaagtatccttcatccatggtgttgaacattcgtaggattaaaatgaaagaagccaaaacctttctagatctttattggtatatcaacagaattagctgattaggtatgcagaaaaaacttgggacttgaagacaccattaaataaataactgtacataaccatacattaaataactgtaacaccattatataaataactaactataaataaagagctctacattcaaactgcttttcactgcatttgtcagatttcacttttaatataattttagttgacttatccctcatcttaccttaagaagataatgagttgaggtggatcttgagccagtgtttagtccaatatagccctttgacttggggaaagatcaaacttcgaaatttatatgcatgactcctctctgggcaaggactgaagtggcaggagaggtgaaagaaggaatcaggacaaaaagtagatgctaaaaggaaaacagtctgtcccgtggagaggaagtacccaaagaaacagaagaactccatgatggagagtaatacaagttgaatatcccttatccaaaatgcttgcgaccagattgttttggctttgggattatttcagattttggaatattttcatacccgctcagtatccctaatctgaaaatccaaaatctgaaatgcttcagtgagcatttcctttcagtgtcatcttggccctcaaaaagttttggattttggagcattttgaattttggatttttggattagggatactcaacctgtactagcgtgttaaaacagtcctggccaggcgcggtggctgacacctgtaatcccagcactttgggaagccgaagcgggcggatcacaagatcagaagatcgagaccatcctggctaacacggtgaaaccctgtctctactaaaaatacaaaaaaattagctgtgccgtggcgggcgcctgtagtcccagctactcgggaggctgaggcaggagaatggcgtgaacccgggaggcggagcttgcagtgagccgagatcgcgccactgcactccagcctgggtgacaaatcgagactccgtctcaaaaaaaaaaaaaaaaatccaaaaaacccaaaacagtcctagaggctacagcctagagcagtgggcaaagagaagcagaatctacagaagatattgttcaaggcctgctatgctaggtctcagatagcaccagaactgggcagggcaagaaacgtcaggcccaggggtctggtttaaccagaagaggtgctgaattttaggatctgaatagcaagggttgtggtcaggaagtcagtttcatgtaagaatgaaggtgagcggatcttaaatccctgaaaggaggcagagagaagaatataggaaatgggtggataatttttgttgcgagtaaaaatgttcaggactttggaggcaggaagagcaggtaaagcaagttcgaggaaagaggctgggtcagaggggatctgaaagcaggagtcagaaacatccattggaggcctggagaacataaatgggaggtgaatagactggggacatagtgcctgggtggaaagaagctggctcgagtccgaaaccacaggctgaaatattaggaaaaagagacccaggaattcagttcagaataggagggatttgtggggcaagaccagtggttcttccagacattttatcagagataacaaagcagaggctgtctgttctctgcccttggtgtgagaagaaaaggactgacaggagtgcttggcagctcaagccagttatggagctgtgggtgctagtggctattaactaccagggaattagctctgctgaatgagtcctcacgcagaggcagggatagaacgttgcattcagaagactggccacggaggccggctggggtggctcacgcctgtaatcccagcactttgggagaccaaggcaggaggatcatctgaggtcaggagttcgagatcagcctggtcaacatggtgaaaccatgcctctactaaaaatacaaaaattagccaggcttggtggcgggtgcctgtaatcccaactactttagaggatgagagaggagaatcgcttgaacccgggaggcagaggttgcagagagccgagatcacgccactgcactccagcctgggcaacaaagagtgaaactccgtcttaaaaaaaaaaaaaaggaaaagaaaagaaaagaagagtggccacagattggcttggctggagaaggcatttttttatagggagatatacgtgagtttgacgggatgggctagcaggcggacattcaggttttatgggataggcaaaaaggtacaaatggtatttggggggatgtgaatggcatctgagaaaggttgatccaggcttgtgtggaagctggctctgagcataaaatgccagagaaaggcttgtacaactctgaggtcttttcttttcttttcttttctttttttttttgagacagagtcttgctcttgtcgcccagcctagagtgtagtagtgtgatctcggctcactgcaacctctgcctccctggttcaagcgattctcctgcctcaccctcctgattacctgggattacaggcacctgccaccaagcctggctaattttttgtatttttagtagagacacggttttaccatgttgcccagggtggtcttgaattcctgacctcaagtgatctgcccacctcagcctcccaaagtgctgagattacaggtgtgagccaccgcacctggcctattttctattttttaaccagtcccaagtaagggtattggttagggttgaggcaatggaaatctgaaagaaagggtgagttaggtatttcactggacacatgtggagaatgttggtgatttaatgcagagggaattgtggttaaaaaggttaatgtaagaagggtcatgtggggactggaaatcacaatagagaaacagaggccagaatgctgaactcataggaagtgggtgaccatgggtgattaaaatgtacaatagggctgggtatagtggctcatgcctgtaatcctagcactttgggggactgaggcagttggatcacctgaggtcaggagttcgagaccagcgtggccaacatggggaaatcccaaccctactaaaaatacaaaaattagccgggcacggtggtgcatgcctgtaaccccagctacgtgggaggctgaggcaggagaatcgcttgaacccaggaggcagagggtgcagtgagccgagactgcgccactgcacttcagcctggggaacaagagcgaaactctgtctcaaaaataaataaataaataaataaaaataaaaaattaaaatgtacaatagagtgtgtaaaaccaggaaatctacatcttgacacttaactacccaagacgcaattggttcctcgtctgatttttaaaagaagtttccactttcttcggaaaatcacgacagtccttgttctcaatttctttgtttttaagaagagaaatgttgtatgatttcacttatataaactacctagaataggcaaattcacagggatagaaaggtggaatggaggtgaccaaaggtggaaaggaaggaggattgttcaatgggtacaacatttctgtttgggatgatgaagaatttctggagatggacaatggtgatggctgcacaacactgggaatgtgcttaatgccattacttaaaaatggctaaaaatcatgcattttatgttatgtatatttacaacttttttttttttttttgagacagtgtcttgctctgtcatccaggctggatggcggtggcatgatctcggctcattgcaacctccacctcccaggttctagcaatgctcctgcctcagcctccccagtagctgggattacaggtgtgtgccaccatgcctggctaatttttgtattttgagtagagatggggttttgccatgttggccaggctggtctcgaactcctaacctcaagtgatctgcccacctcagcctcccaaagtgctgggattacaggtgtgagccaccatacctgccatatttacaacttttaaatcataggaaagaaaccactaatgctttgacaactgtgagattttgaatctcaactgtgagattatggtttgtggaaatttctttatgtgattaaaaaagatactttttttgccaaaaaatttgttttcgctgtcatgcaagttctcctgggtaagcacctttggtcttgttttgtgcatagcatacagagcagcaattgtatattgctaaagaaagcctgttttttttttcttgttaatttatttaagttccttgtagattctggatattaccctttgtcagatggatggattacaaaatttttctcccattctgtaggttgcctgttcactctgatgatagtttcttttgctgtgcagaagctctttagtttaattagatcccatttgtcaattttggcttttgttgccattgcttttgtgttttagtcatgaagtctttgcctatgcttatgtcctgaatggtattgcctaggttttcttctagggtttttatggttttaggtcttatgtttaaatctttaatctgtcttgagttaatttttgtataaggtataaggaaggggtccagtttcagttttctgcatatggctagccagttttcccaataccatttattaaacggggaatcctttccccataaggatatgaacagacacttttcaaaagaagacatttatgcagccaacaaacatatgaaaaaaacctcattatcactggtcattagagaaatgaaaatcaaaaccacaatgagatactatctcacactagtcagaatggttgttattaaaaagtaaaaatataacaggtactggtgaagttgcagagaaataggaacacatatactgttggtgggagtgtaaattatttcaaccattgtggaagacagtgtggcgattcctcaaggatctagaactagaaatgctatttgacccagcaatcccattactgggtatatacccaaaggattataaatcattctactataaagacacatgcacacgtatgtttattgcagcactattcacaatagcaaagacttggaaccaacccaaatgtccatcaatgtttgaccgaataaagaaaatgtggcgcgtgaacccgggaggcggagcttgcagtgagccgagatcccgccactgcactccaccctgggcgacagagcgagactccgtctcaaaaaaaaaaaaaaaaaaaaaggaaatgtggcacatatacaccatggaatactatgcagccataaaaaagaatgagtttatgtcctttgcagggacatggatgaagctggaaaccatcattctcagcaaactaacacagaaacagaaaaccaaacactgcatgttctcactcacaagtgggtgagttccataatgagtgggtgagttccacaagttccacaagtttcacaagtgggtgagttccacaagttctataatgagaacatatttgcacagggaggggaacatcacacaccagggcctgtcggggggttgggggtcaaggggaagaatagcattaggagaaatatctaatgtagatgacgagttgatgggtgcagcaaaccaccatgacacatgtatacctatgtaacgaacctgcacattctgcacatgtatcccagaacttaaggtataataaaaaagaaaaagaaaaagaaaaaaaaccctgccttttgctttggcagtcatcattccttccatcttctcatgttttcttatttaactcagtagttctcaattgacagcacaaaagaattactcaggagagttcaaaaaacacctatggctgactcccccaagattctgatttccttggtgtggggtagcctgggcatgaatattatttaaaaactcctctcatgattctaaggtggtagccaggattgaaaaatgctggactttcaagtttttgttttctttcttttcttccaaaaaggtgaagccctgacttgggaagaattcaaatgcgagttaggcttatgtttgatgtcactgattcctaaagatcagtccattgattctcctcattctcaggagagcatttggtgtcaaaatcacagcccaaaactcttaccctagttcagcatctaactctcttcagtcctgaaactgtttttgtcactctgtccatataatcacagtgttgtagaaatttccagctaaacattgtctcaaactttttgtacctagttttaaatcaaaatgtagtacaaaattattaaatacaacgggctttaaaatattgagattttggtgatcttttttgtagaatgcaaatactaatgaaactaattttttcttttgctttcaaactatacatttcttctaaaacttctttcaaagtagaatttcataagtggaagaacccttgaagattattttaatagaattccttaattttagagatgaggaaactgagactcaaatatattaattaatttatctaagtgtcttagtccattttgtgctgctataagagagcatacttgagactgggtaatttatattgaacagaaatttattggctcacgattctggaggttggaaagtctgatatcaaggtgctggcatctggcaagggccttctggatgtgtctacatggtggaaggcggaagggccaagaggtaaaatgtggctgaatttgtgcttctattatggcatgaatcccatccatgaaggtggaggcctcatggcctaatcatttctcacaggcaccaccttttaatactgttacaatggcaattacatttcaacatgagctttggaggagacaaaaattcaaaccatagcactgaagttatacaactagttaagaagagagaacctgagactgaaaccctgatgttttgactcccaatccagaatgtttgatcccctacatcccaccgcttcgctgtttccattcctttctcctgttttcatctattttcactaagagggcaagatatttgctaactgctacacacccaaattgtataccaggcaggtcagaatgactctaacattttatttaatgaggcagaataaaatatcttcctactaaacagtgacaagtgtttgttttaaaaaaaagtattgtgcacaaaaaaaaaaactactttcagcataggctatattttacaaaataaatttacagtgggaaccacagagctatttagagtgtctggtataaatgattttattgttactctgcttttttgaaaaagaagtgtgtgaagcagaggtaagtagtactgaggaaataataactaaaatactaaggacgagatgcacatgggaaaagttcttcattaactgtaacgtggtggagaaatgtatgttctagacaggtcaatcatggaattagaaaaagttgggatcttggattgttgagttcaaatccttagttttaaaactgaagacttcaaattttgattgactacagatcaatcaacaacctgttggagttggaaacttgaatctgattctccatccttgtttgggatatgaaaaaaaggaagacatttaagagtatttttttatttatgaaactaatgtatcatcatgtaaaaatatgaaatagaaagtgttaaaaattataaagaaacaagaatgtgtttttataatctcattttcttactttacgtaagatggtaagtctattttggaattaattgtttttaagaatagtattataattcaatgttagataaagatttatttaaccctttcccctttaacaagtgtttgggttttttaagtttgcttccaagttttcggtaaatgatgcttcaatggatatctctgtttgttatcttagtatgtatcttagattaattcctcaagataaatatttaaaggtatggtatatgtaatattcttgatacatacttccatatttccctccagaaatgtgtgcacctatttaaatgtgtgtggaggtgcacattttaacattcctcattattctggctgccttctataaatcaagctaccctggtattatggctctcctccagaaatctaatcatttaaacacatgaagtgaatgtgtgaatggacaattaagtgctggccaaatgtggaaaaatgttaagtgtaaatcaaaggcaactgaaacgttaaatacaccttccattcctccgccacatccatgctctttcccatactccacatctgctcactaaaattggaaataaactgtaatgaaccagaaatgtctgacttactggtgtgtttaggtgagttttattgaaacactgactgaccccaccactctaataccatcaccttaatgtttgtatcttagattaattcctcaagataaatatttaaacgtatggtatatgtaatattattgatacatacttccatagttccagcaaccacttgtcatcctgtgtcccccaaggacactgcaatgactgtcacagtgacttgtgctcggttgaggagcaagtggtggctgaaatccagccccagtcagctccccaaaccaaaccacttttacacagtgtctatgtgtaaagttggtttgctttggggagattgatccccataagggatcagcaccagccctgtgtctatctcttcttctcctggggagatgttggctattttgctagctggagaagggcacgcaatttgttgtcaggagacaggttcttaagttccattggtacatgcagggcaagacaggcagagggaatctgtcactgctacaggcacttcataagcccaggtatagacgataattgaaatggattgatttcatagtagtctaatacagagtggtgctacaatctctgtatgtgcctatttagaaaataacttcatatttaattcttcactttacataaaagatatgtgtattaaatacaccttttattttagaacagttttagattttagatttaaattgggaagacagtagagatttcctatctaacccacacccagctcccgtattagtaactaacatcttgcattagtatggtatattacaattaatgaaccaatactgttattttattattaacttaattcatgctttattccagttcccttagtttctacccaatgtccgttttctattccagtatcccatccagaataccacattacattctgttgccatgagtttctcagattttccatgtttttgatgaccttgacagttttgaggaatactggtcaagcgttttgtagaatgtacctcaactgagatttgtctcatgtttttctcatgattaacttggtattacaggtgttttgagaggaagaccacagaaatgaaatgccattcttattacatcatatcaagcatatattctaacaatatgatttatgacaactaatgttgaccttggccaactggctggggtagtatttgtctagtttctcctctgtaaagtccttccttaccccctttccacactgtactctttgaaggaagtcactctgcacagctcacaatgaaggagtggggagctatgcttcccctctttgagagttgtgtatgtacacaaattatttggaattcttctgcatgggagatttgtctattctcccctatttatttatttattgaattatttatatcagtatagcttcatggatatttattttagactttgggctaaaaaacaatactactttattttattgttcaaattgttccagcttctagaagttatatttttatagagaagatatgtttttaaatataaaaacactttaaaaaaatgaagtcaacaggataaaatatttttaaattttccttaatgggtgttctttgtaccatgtttccatcaaataacattctgattgaaatctaaaaattagtgtttgtattttaagtgctaagatcagagaaaaagtcacaagtttcccagactgagttaggcaacatgtgactcagagttataaggaatacctttcccattcctgcattgcaaccagtgttacagttacagaagtgactagtgtaacttcccctcctgggttccagctgccaggacttactttagttcttttaacatatccttcccaccaaagataagttttttgaacagtttccccatgagtgctccccccaccccaacttgtgccttttattcatgtctttataatatttattggttggctggtgcaattgcagaggttggcaagtctgaaatttgtagagcaggccagcaggctggaaactcaggcaggagttaatgctacattctagggacatttttttcttctctggaaacttcagtttttgctgacaagcttttcaactgattgggcaaggcccacccatgttatgagggggaactgtacaatcagttgtcatttaagccaatcagtcaactgatggttggtgtcaaccatatcttcagaataccttcactacaacatctagactcatgtttgattaaataactgggtgccataaccttggcaagttgacacctgaaattggccatcacagtgaccaagacagaaagtgtaatgagcaggaaagcaccccagtgacaggacagtgaaagatgagcctggagacggggagtgggaggagtgctttgacagaatggtcaagagagatggcatctgggtggagatatgaaaagatgtaaaagaagggaaggaaccagttctgccaagaatttatacttctacaatttcccagatgatattgatgctgttgccctggagcccatactttgagaaccacagagtaagggtatacctctgttattatccaatgaatcctgagaaagcccattaatatctcagtgtgaccattttttctcaaaattcctacctcacatgctctgaggggctggcagcttttctgggaaggtaaaatctcaagagggaggctttgaatgattccaggacaaagtgaagataacatactaccgcaggtaaagtctaggtttacttggaggtggctcaaaacacaaatcctgtcaattttaatgacacatgaggccatgactctgggtcgtcactctgggcaagccattgaacccattagaacctcagttttcccatctgtacaaaaagaggtgataatgggtaagcaatcctggactgcattgtggtagtgccatcaagcaatgagatttgtcaggaaggaagtgtgattcaagtacaggcactttgttatctgatgcctgtgtgttgagtgtgaaggaggggttaattattcctctattcatgtcctttctattctcaaaatttcttatgtgggaggaaaatcttggtgcggtaaagatcacagccaccctggggtcagacagaggactgtgtcaagcttggtaagcgtcaccattcaggtgagtgggaaagagactgaaccccattaaaccagatgacctccaaggccctgcccgccccaacatctgagggctgcctggcttgtctgcacagggtgctcacagtactcctgactttgacataattttaacattaaagtcacaaggatgccctggatcacaactgctggagaagagatggtagtgggatttgtttcccaggagactttctgattctagtggggccaggaccaacctccaaaataagaggtctttgcaactgctgcgagcctcctggcacctctaccctctagcgagaggctgcctctcctgccccaccccggtttcaagcacgctgcagggcaggaactcactgtgctggcaaaggtgagctggagacctggcacggcataaagcttttttaactgaccctttttaatttcatcttccctggacttaatctagagagtcattgatgaaacaaacatgccattttctcccgatttcacgcttttaaatgtcaacaacaaacaaacgtttatatacacaaatgttgctgaaggagacttttggctttagacaagggtaaaaactgaacctcttagtgtgactttggttgattttttaaaaaatctgtaatttgacatataaagaattattaagactttttttttttttctggtaggcattgaatgtgtccttgaaaagaaaaaaaatatgctcagtttcaatcttctgtctatgggtagctagttatcccagccttagttattgaataaggagtcttttcaccattgcttattttattttactttttgagatggggtcttgctctgtcacccaggctggagtgcagtggcacgattttggctcactgcaacctccgcctcccaggttcaagcgattcccctgcctcagtctcccaagtagtttggattacacatgtgcaccaccacacctggctaatttttgtattttgatagagacagggtttcaccaagttggccaggctggtcgtgaactcctgacctcagttgatccaccccacttggcctcccaaagtactgggattacaggcatgagccaccgtgcctggctgcattgcttatttttgtcagctttgtcaaagatcagatagttgtaggtgtgtggtcttatttctgggctctctattctgttccatcagtctatgtgtctgtttgtgtatcagtgccatgttgttttggttattgtagccctgtagtatggtttgaagttggataacatgatgcttccagctttgttctttttgcttagattgtcttggctatttgggatctttttttggttccatatgaattttaaaatagtttttttctagttctgtgaagtatgtcactggtagtttgataggaatagcattgaatctataagttgctttgagcagtatggcccttttattgatattgattcttcctattcatgagcatggaatgttttttccatttgtttgtgtcatctctgatttatttgagcagggttttgtagttcttcttgtagagaatttcacctcccgggttagctgtattcctaggtgttttatttcttttgtggcaattgtgaatgggattgtgttcctgatttggctctttgcttgactatttttggtgtataggaaggctaagtgatttctgtatgttgattttgtgtcctgagagtttgctgaagttgtttatcagctgaaggagcttttgggccaacactatggggttttctaaatatagggacatgtcatctgcaaatagggatagtttgactacctctctttctatttggatgtgctatatttctttctcttgcctgattgctctggccaggacttctaatactatgttgaataggagtggtgagagagggcatcattttcttgtaactggaccccttccttacaccatatataaaaactaactcaagatggattaaagacttaaatgaaaagcccaaaactctaagaaccctggaagactactgaggcaataccatcttagacataggaatgggcaaaaatttcatgatgaagatgacaaaagcaattgcaacaaaagcagaaattgagaaatgagatctaattatactaaagagcttctatataacaaataaaactatcaacagagtaaacagacaacctacagaatgggagaaaatttttgcaaactatgcgtctaaccaaggtctactatccagcatctataaggaacttaaatttacaagaaaaaaacaacctcattaaaaagcaggcaaagggcatgaacagacacttttcaacagaagacatacatgtggccaacaagcatatgaaaaaagctcagcatcactgatcattagagaaatgcaaatcaaaaccacaatgagataccatctcacaccaatcagagtggttgttattaaaaagtcaaaatataatagatgctggtgaagttgcagagaaatgggaacacttatataatgttggtgggagtgtaaattagttcaatcattgtgaaaaacagtatgatgattcctcaaagacctaaaaatacaactaccattcaacctagcaattccatgactgggtatatacccaaatggatataaattgttctatcataacgacacatacatgcatatgttcattgcagcactattcacaatagcaaagacatggaatcaatctaaatgcccattgatggtagactggataaagaaaatgtggtacatatacatgatagaatactatgcagccaccaaaaagaatgagatcatgtccttttcaggaacatggaaggagctggaggccattatccttagcaaactaatgcaggaacagaaaacctaatactgcatgttctcacttgtaagtgggagctacatgattagaattcatggacacatagagaggaataacagacactggggcctatcagagggtggagggtggaaggagggagaggatcaggaaaaataactaatgggtactaggcttaatacctgggtgatgaaataatctgtacaacaaacccccatgacacaagtttacctatgaaacaaacctgcacgtgtacccctgaacttaaaataaaagttaaaaaaaaaccccaaaaggtgaagtgttggtgaggatgtggagaaaagggaacccttattacacaattagtgggaatgtaaattagtgcagccattttggaaaatagccaaggaaaatttttttattgagtcagatgatgttaccttacagcaatagcttccaaaggggatgtcctgaatagtagaacttctctttacattttcaaacctctttttactttctgattttgagtttcataatgaacatgtatcaatacaatagcacactatgtattttataaatgaacaaatatgggaaaaataagatatgttcactttcctggctgaccctagttagtctaaactatcagttataggatccatttgttctaaatattgaaggcattgttgggggcagtggggagggtgaatgatagacgcaaattccttgaaggaatagaaatgtgactactatgctgaaaagcaggacccatggagtataaatagagtattcactgtgcttttacatttgtttccctggaggaaacgtaaaacaaatctcaagactttctggtcatttctaagtcataaacggccactagtcactaatttatataaccagcccaatgtaaatatcaaacgtgtgagtttcatttcatctcacaactcctcccctttcccagttctggccccatacaagcccgctgcctgcagtgtaatggaggaagatggtttctttttccttccctcccatttatttgtctttgtgcatcttaaagccagcctgaatttctactccctacaaggttgaagtgggtgggtcaggaggtggggagagagctaaggaacgttggcgtgagttgttgttgtgtttgagtctggaaggtgttgggagctgccccccctcactcagggcctcatttatgggctcttcggataacccccatgctctagcactgggatcttgccctgtggatccctccatgcaggtggcaccacaccctctggctggttgtgatgggccttctcagctttgagaattagcaacacacttcctattgaagtcatctgtccctgtgggtagcccacttgggctggatgcaaactgaacctgcactgattctctcttgcatgtggcccacatgagctccattttcctccgcaaactttgggtgcacagccccacgacgacacagacagcttttcttgcgtgccaccaaagtggtgggccagagttctcttatccttaagattttcaggtgtcaccacgtccaccaattcttggcagacatgaatcaatacttccaagggttttggtgaagcccttttccctgggctgcagatgagggcagccatgtcctgtctcttccacctgttgtggaaggggttcatggcaaacatcttcgaacatcctctaatttcccaattcttgatcctttcgtatgcttgatgtgtgagagagaagagagaagagagaaacgcttcttgctgctttttttttttttaatcccacatggtgaccttagactttactttggaatgtgccatttaatatctggggacctcagcccaacacagggactaaatagctctgttttaacattttgtttatatacacacattcatttgaccaaatgaacatgttccagcttttttaacccttgcccagcaaatcacttaattcagttaataaaaagactaaaataatgaggccaaccttattggccacgaacatctgttgggtattcctaaattgatccctgagttaatctccacctttaaggagtttataattttatttggcaaattgatgttataatgaaattcctgggcatgaaaaaaacctaactatgtaatgttggatagtgtgagttttcccaaaagtaccagtataagcaataaatgctataactgatcatgaattgtttacagtgattgagtagaatcattgcatctggtcatgaatagaaagagcacctcccagacggctggtctgctgccaggtgtgcagttttaggggtctccacactcattctattcacatcttttgactttatcagctgtgtggtggatctgtggttacaggctgatgtggtttggctgtgacctcgctcaaatctcatcttgaattgtagctcccataattcccacgtgtcatgggagggatccagtcggaggtaattgaatcacgggggcgggtctctcccgtgctgttctcgtggtaatgaataagtctcacgagatctgatggttttataaatgggagttctctttcacgagctctcttgcctgccgccatgtaagaagcgcctttgctcttcctttgtcttctgccatgattgtgaggccttcccagccatgtggaactgtgagtccattaaacctctttcctttataaattacccagtcttggatatgtctttattagcagtgtgaaaatggactaatacatgagccacattgttacagagtttctgaaggtcattaagagaagtccatgctgtgggctgagctgggactcaagaatctcaaaggagagccagtgcaatcaacacgaagggcccatcttgaactcctaaggcagggcagagctgggtcttatggagacatgtggctttcaggtaatccagtgagcacctgtgttttcctcctataattcttgaggaatggatattgttctatatttcagatagtataataataaatacctggaaaatactgtatgaccccaaacaacaggtaaaatgtcaaaaaaaaccttttatctacacaaagttagacaacaaattcaaataatcttatccgtttattcattctcttccaatacaatcatgtatcatttaatgatggggatgagtttggaggaaggtgttgttaggagattttgtcatggtgcaaacatcatcaagtatacttatgccaacctcagtggtatagcctactacacatctaggcttggatagtacagcctgttgctcctaggctataaacctgtacagcatgttactgtcctgaatactgcggcaactataaaataatggtaagtatttgtatatctaaacacacttcaacatagaaaaggcacagtgaaaatatggtataagagataaaaaatggtccacctgtacaaggcacttgccagaatggagcttgcaggactggaagttgctctgggagagtcagcgaatggctgatgagtgaatgtgaaggcctagggcattattgtatgctactgtaaactttataaacactgtgcacttaggatacactaaatttattaaaaatttttctttcttcaatcaataataagtgaacattagcttactgtatttttttttttactttataaactttaatttttttttagagatagggtcttgctctgttggccaggctggagtgcagtggcacaatcatagttcactacaacattgaactcctaggcttaagcaatcctcacacctcagcctcctgggtagctggtactgcagacgtacactactgcacccagctaatttttaaattttttgtagcgactgggttctgctatgttgaccaggctggtcttgaactcctgactcaagcaatcctcctgcctcagcctcccagcatgctgggattataggtgtgagctactgcacttggcctaaactctaatttttaaaatcttcttgactgttttataataacacttagtttgaaacacaaacacattgtacagctgtacaaaaatgttttctttctttacatccttattctataagcttttttctgtttaagtttttaaaaatgttttagtctgagtgcgggggctcacgcctgtaatcctagcactttgggaggccgaggcgggcagatcatgaggtcaggagatcgagaccatcctggctaacacggtgaaaccctgtctctactaaaaatacaaaaaaattagccgggcatggtggtgtgcacctgcagtcccagctactcgggcggctgaggcaggagaatggcatgaacccaggaggcggagcttgcagtgagctgagtttgcaccactgcactccagcctgggcgacagaacgagactctatctcaaaaaaaaaaaaaaaagttttaaacctttttaaaaaatcaaagtcacagacacatgcattagcctaggcctacccagggtcaggatcatcaatgtcactgtcttccccttccacatcttgtcccactggaaagtcctcagggacagtaacacccctggagctgtcatctcctctgataataatatgggcttctggaagacctccagaaggacctgcctcctgcctaatgctgttttacaggtaatatttttttctagtagaaggagtacactaaaataatgataaaaactgtagtaaagtaaatatataaattagtcatatagtcatttattatcataatcattatgtactgtacataattgtattgccagacttttatacaactggtggcacaataggtttgcttacaccagcatcaccacacacgtgagtaatgtgttgtgctgtgacattaggacagctacaatgtcaggaggcaataggaatttttcagctccattataaccttacaagaccactgtcatatctgcagtacaaaacatcattatgtggtgcatgactatatttactgagcaccaaatatgtgcccaggcagtgtgctaggggctggaagtgacctcgaagtctagtaaaaaaaccacaacagtaaaacaatatgtgtaattcaaagtgacatatcctgtaatagctggttgcctacctgctccccagagagaaattaaacctgcttgcttaacttattaattttaaattcatgtacttgcaatataaaaacatattttaaaacatattaggagaataggatgtcttctgtagtgataggctatttaatgttctcttcactgtgttctaaaaaaatcgtgatcgagtgtaacaaaatggggaagggagggttagcataaactctcctttgatgtctatgctgtggatcagaaaactcatgaatatgttaacaactggattttctcctaatatgaaaacaactctttggcttcttttgcaaatgtgaaaagttaaccataaatataagaccttttctttccactaaaactagggcacaatcattgttttcctcttattggagtccaaatgggtttccataatcttcagatctagtagttgtatttatcgatgacataaatggaaagactaaaagataaagttaagaaaaattcagtggtttatggcttcaactctactgataattttgtatataaagggatcctaaattagactgtacacacatttgccatttgagttccaagcattttagcaatagatcaaaagatcttaatgcctgatagttgaaagattacttccaaattttttttatttttgtgaaagccaaagtccttttctcaacatgacagtcacaattttgtcaacaatctacccgttatttacaaaggtttaaaatctgataatagatatttacttggactatacaatgtctcagtgggagcaatagatggtttacaatgggtctgaaaatgttgcaaatagtcaaaactggcattgcaacaattcatttccaaaaacacactagactcgtgagtttttggtttttaagtttatatagcttgcttctggtgttaacgttctccacacctaaggtgccaacatgcatggctactctttgtccccagagaaacattgctaatttgtaccaaatttcaatgatgtgtcaagcaaactgtcattttggaatgatagtaagcacgccttcaacaacagctctttatttcgtccaaaacctttgggccacacaattctgacctttatcacactctcagtacctttcattcattattagcttgtgcttctggggccccgggaattgtcaactatggtcaaaataatggagcaaaatagcaagaagaacttgcgtttcctatatcattgcatttaatctttgcaacaactctttgaggtggaaattgccccaattttatagattcagcttaaagaccttgatttgtccaagatcacacaaccactaggaggtataatgttcaaataaaaatgtctgaaaagagctgggtgtggtgggtcatgcctgtaatcccagcacgttgggaggctgaggtggggggatcacctgaggtcaggagtttgaaaccagcctgggcaacatggcgaaaccccgcctctactaaaaatacaaaaattagctgggtgtggtggtgcatacatgtaatcccagctacttgggagactgaggcacgagaattgaatgaaccctgtgaggcagaggttgcagtgagctgaaatcgcaccactgcactccagcccaggcggcagagtgagactccatctcaaaaaaaaaaaaaaaaaaaaatctggaaagatagattacttggcctcaatcatagtaaaaaagtgtcagttaaaactgcatggagagatactattttgaaaagcatcaaaaagttcgaagatccatcatatttgtaaggctatgggagtttaaattgtacaggcgttatgaaggcatttggttacatctaccaaaattaacaccgcacatatttactcatgtgcaaattgacttatgtacaaatttactaattgtagcattgttgataattgtaaaatattaggaacacacctaattgccattaatggggaactggtaaaataaactagaattcctctgtgcatggaatactatgcagtcatcaaaaatgacgaagatgtggccgggtgcggtggctcacgcctgtaatccagcactttgggaggccgaggtgggcggatcatgaggtcaggagatcaaaatcatcctggctaacacagtgaaaccccatctcttctaaaaataccaaaaaaaaaaaaccaaaacacaattagccgggcatggtggcgggtgcctgtagtcccagctactcgggaggctgaggcaggagaatggcgtgaacccaggaggcggagcttgcagtgagccgagattgggccactgcacgccagcctgggtgacagagtgagactccgtctcaaaaaaaaaaaaaagaaaacagaacaaaacaaaaaatgaggaagatgtttatttagtgaaatagaaagatatccaagatatgttgctaataaaaacaaaaaaaaacacatggcacaaataaggtgcatgttactatctgggtcttttaaaaaggggtgtggaagaatgtgtgtgtgtgttttcttcaatatgtgtagaatatctctggaaggaaatttaaaaactggcgacctcagctgtctccagagagggaaaattggtgggttgcaggcagaggtgaaagattttcccactatgactttgaaaatatcttttcaagtttaaagcaccaactgcattatatatcaagagtaaataaaatacaattttaaaatgaaatggcatttgtaaaacacttgatagatgttcagttaacagccatcaggatttattagtaattgtggtttttgccattaaaagtaattttaaaagtaatggttttgccattagttttaatgacaaaaaccacaattagttttgcaccaaccaaataccttacgcttctggtgagggctcagaagagagatcataagtaaagaacactagaaaggatgtttaatattatttccctttttaaaactggtggttgtcaaagcagtctgaaggaaaagtctccagaactggtgatcatgttcacatagcagtagtttggagtcaacagaaatcatcttcaccatcaacctagctccgaaagaggccgagccaatctagttcccttggccaaccaccttcctcccaacctatacgttggggtgatccactacaaagctctcaagagtatacacaatgctactacagtcattgtgagtgagatctgaagggagcataggctaggactcatgagattatagttcagagtttctactgtaattcctttcagcaaagtgaagagcatgtcactggggttacaagtgttactggctacttagctagtgctagattacccaaaaaagtaaccgggtctcatgggcagaggtgggaaagtctgttaagcacatagtgaaggatgaatctgggctgattggaaaacatttgtttgaatgaatgtagcatttatttccaagaataagcatgtccagactgattgagcaagagttatatttagttcagtcgttctgatgtccattttgagaaagctaaaccagcatgccagaaggggtcaaagatcacattttgcatgaaagaaaagccaatggaaatgggactgttagacttaaacttttgggtattttacactaggacttagaaaggactttattcctttttatattttctgtctctagcattgcaagtagcaacagagtgaatttttggtatttggaatactctctcctcatttttcctttgggaaaatcattagcctatttgatttgactgctgttgaatatgttccatgacatccataagtctaccttcaggcattgcttgtgcttgtttattacatatgattaattgcttacataagaacaatgatgatccctgcagggggaggagggatgtgaagaacaacttacttaggcattccaggggctaacaagggatggtttgatacagctcattcttgttttgaatcttcatgcctcttgagaaagaaaggagcagaatatgctttgcatggcgctatgtcctcccaggtcctatgttttcttttttgtattttatcagttctctacgtaaggattttctcagtttaatataatttccatttttaaaattcaaatacctacatatgaggtgggaaaggaaattaatcagatgcattcctataaactgcagacttaaattaagaccttgagcaaactggcattttgatgacttgaggattcagtgggtgggacagttgtacatcttgaactctgggtacactgccgaaagcgaggcctgagaaggctgtgttgaggaaggagtgtcagtgactgagcctgttggaaagggaggctgagagagatgaggacacatacgtaagggagaacacattggctggccaggtgtttttttttctgctgtggattttgattagaattctgggtctcattaagtgacccatgttgaatagagattggatagggctggcttggaaagccctcagtgaagagatgaactcgacagcatgataaggaagtagatgcaaattcaggacaggaaatggagaagggcagggtgagaaaagggaacaaatttacaatttgtgccattagccatttattagaatttggtataagaatttgtggaattattgtttccttctggatttatggtacaaaaacctactgacaagtgtcactaaaagtgatgtctttattcaattatcaaccaaaagttttacactaaattcttttgagtctttgaatgtttatgttatttccaataatctttccagttcttttaaaaggctgatttttaggaaggctagcactttttgatcacagaatagtttccccaatgagtatgatagcttcaatatctttcaaattagattcttttggaaattgaactgtgtcaaatcaaataaaacaagtagggttttttgctgttattgttgaaggtattatatttgcaagtttgtacaatttagcagatataggaaaggtctaatttttttctttagctagaatgttcagttcaaattatacagatataagcatgagacctaaatgaactctcttctgatgagtaatgaatggaaggtagattactcatttcttcatgttcaaaaaacaaattatgtctctgaacacagttgtttcaatgtttttaacttatgttctcaagctcttcccatttctttatcagtgatttgggaatgtgaaggcagtcttgttgtagtttccaaagatttaggcatttttgagactctaagaatagttcattaagccaccaattagtcccttaattttatttaagctgagcaagcaaggcccacactaaaagtcagaagaatgcggcatctacccagagaggctgagggtgggatagaaagaaggaggcactccaagtttggagacacagattctattccagttcctcaagctgcatgaccttcagcaagtctcctgtgttgttcaggaccccagtttctttataagtgcaatgaagagtttggactcaacaacttataaagaaacattcattctaattgtctattgtgtgaaaagaatgtgagttgttctagaaaatatgaatctgctccccaattgtcctccaagctctggttctaaatttcagttattatagttacttctttcgaggtaaatcattgaggaagtcagttaatgcagagatgatgtctggaaggagtttacaagttcattgttcaaatagtatttgttgggggccaactacaactacacatcagggattgtgctcacattggactagtgtctttggaaaacagagtccttgtgtgccctttttgaatttacaggccaacttggggaagcagagagacaaataggaaatccaacagcatgataagtagtataatgagaatgtttagggagatacgagcatttataggagtagcactcaacaggaaatcaaggaaggcttcctggtggctatgatgtctcaagggagacttgaagcatgagtaggagtatgtcagatgaaaagggatgggaggaagatttcaggtagggtaatttgcatacgtgaatatttagacccagagaaagtccagagggactgaggaacttaaaagaaatccagtatgggaggagcatagtacctgttggggagggtggggactcttgataaatgaggatagtaattcaagttctttggctcttgagttacttttggacaagttgagcttcaagtagctagtacataggaggagcttaataaatatttattgaatgaatgaacatgtaagtaaaaatgtctaataggtacctggcaaagtggacttcctagtcaggaaagagaggttggttggagatttctattttgaaattttcaatgtatatatgaaagtaaaaacacaaggagtggttgtgatcatccaggagaaggtatgcagaggagggaagagggtctaggggctgaatcctggggtacccacacctgagaggagggagaggaagaggggctctcagaagagcctgagcaggaagggccattgtaataggactaaacactaagcccctgaagtcagctctctgggggcagaggtttttgttctgtttattttgggatgcctgctgttgaccagattatgctcccctacccacccaaattcacatattgaagccctaacactcaatgtgactgtatctggagatagggtctttgggaggtaattatggttaaatgatgttttaaggctgggaccctactctgataggactgtggccttataaaaagagctctctctttttctgtcctcctccttctacctcctccaggacccaccccaaccccacactgagaaaataaatcgctgttgtttaaatcacccagtctatggtattttgttacagtagcctgagctgaccaaaacagttctccgcacttagaaatggtcctggtaaatacagctaatcaatatttttttgagtgaattgaatgaatgagtcattcactggcatgcttataaatgcattactccctccacagtgtgattgtcattgagcaggttgggagaagggaggagctctcgcaaacatggaagtcctgggtgcttagggagaatgggaaggtgccgtggtcacaaaatcggaagaaagagctgaaaggctgaaaggctgaaaatgctaaactgctcaaatctcctctgtctttttttaaaaaaaatcatttggctaggctggctctgaaattggggatggttcttggttgattatgtggtgtgtgtgtgtgtgtgtgtgtgtgtgtgtaaaggcccttcttaacattagataggactatctgaatctaagtgaatttaggcacaatctagatattgctcttcatagagaaataatactctaagctggcaatgaaattcctcaagtaaacaacagataaagggaaggagagggacacagtgtaacaataattggaataattggaattcttgtatcactcatggcacttacagtgaaagtactttctacattgtcttctattacatgcaacataggtacattatataaaaagatcctaaaatattgttaaaagaaattttcccagaaaatgtaagataaaagttactaaattctattaagcttgcaagttaaatccaaatcattcattgactcataatcaagaacagtcatgctgcctgacaaccaaaaaattcaaactgtcttcatcaagtcctgggtgggaagccaggaaatgggatctgagatcacaggctttgtgagagtcagggtctttggcgtgattcttggtcacaaatcatgcatttttttccttggagagatagtgggaaagaaaaggctgtttaaaaacatgttaaagaatactgattccatttgacttcttgttaatgtgtacccttgcagacttgggtaaaacttgatcatgttaaaagccattgtacttaaagattcatgactagagtgttaggacaattctgtggccttgggggtcccattgcagcaagaagagtctgactgagaagaggatagctccgtcctttgatgcctagtaacctgcatgcccagcactttgctggctgggccattggtaggaaatgcggtacatgcacttcaatctgtaagagatcatggtccatagagatcatagatttattttgccacctggcccagatggtgatagaagtcaggacaatggttgcctagaggggttgggagtttattagaatgggacacaaagggaaatttctggggtgatggaaatactctatactttcattgggatgattgttacatggacatatccatctgtcaaattcatcaaatggtatgctttagatacatgtatttcattgtatataaattttgcctcaagaaacaaaaactcaaggtcaggtgaaaaaagtccaggagctaatcaaaaacccttaaaataagtgaccaaactatttgtgaaaatgagcagaaacttaaagggaaattctttgttatttttccacattagaggaaaattgatggtatcagataaatgctcaaaaataagcttccaaacagagcatttataatcagtacaataataagtttgaacacagacaaaccttcatgtctcagagtgaaggaaccatttctagtagtataagctattacggagatagttccacatttattttctttcatgtttcttttggaggaataatgtttttgtaaatgtaaaatgcttttaatggagctagagaagaagctatgtttggtcatagtattatctgcttgcgaactaaaaattcagagctctcttgtgaatcatgctgccaagaattgcagacttaagcctcaagattgtacgaatttaaattttgactttatggcctcagttggcatgaagatacaaagataatcttctagcaaaaacagttttgaaagaccgggcgtgatggctcatgcctataatcccagcactttgggaggttgaggcgggtggatcacctgtggtcaggagttcaggaccagcctggccaacatggtgaaatcctgtctcaactaaacatacaaaaaaattagctgggtgtggtggcggacacctgtaatcccagctacttagggaggctgaggcaggagaatcgcttgaacccaggaggcagaggttgcagtgagccgagatcacaccagtgtactccagcctgggtgacaaaagtgaaactctgtctcaaaaaaaaaaaaaaatggtagaatgtcacatggaaagttaacttttagagatagtaatccagacacctataatattacattgtccttttaagtatctatatcaataaattaaccaacatttgttgacttaacatggccagggacagtgctgggttctcataattcccaagtaattctagccagaccttgtcctcaaggagcttatgagcagcatgaggagataaaaaacagataaataactctaattcaggaagaatttgataaatgcatgataactactactagaattcagaggagaggaaattttctttgaatagagactaaaggaaggaataatgaatgtggtagcatttgggctggacctattacaagaggcatgctttcccctgacaagccaagaaagtggggatttaaggtagaagaaaagaaaagccttgagttcttggagtattaaaattttgcttggctgaagcataggttacagtcggaggagatggactaggaaggatcgttatgggcagagaggaagccctgaactcatgggggaagctatgatttgggttaaagacagagctgggtcatgtcaagatggatcctgaagcagtaaaaaaaaatccaagaaagtaaacaggttgcagggtttaggatgaagtccgggaggaaagggcagagtggtccttaggaggccgttaggacaggtaaggtaatgggtctcaaagggagtggccgaaatgcaatggaaaaagagagattgtaaagctagaaggcttaggaattgcctcttgattaggtgtggaaggcaagggaaaatcagccctcgaagaagacagtgagattttaatctgggtggctggagagacagtgatgctgggcacagacacggggaagttgagaggaacaccatgtttgagaatggtgactcatatttgaacaagcctgcaatgcccagcagaccgctggaaaagtggggctggagacacattcaacggaggagccagatcaatctttacccttcttcacctgagagagccagtaagtcacggctggaacgtgtgtgtccagcaggagagggtagggagggaagccaagagagctgggagcccgagtgaagtttttgccaaaggcagaagaggaaagtcggcgtagcacagtatactttcccacccatgctcaccaagcccagggacaaggctcaccaagatgagtttggaagagaatgctggagagaaagtggttaagaaaactgcctttactgaacttcttgggctaactttgattgtaagtctctgaacaatcaaagcctgtgaggagacagctaaccttcttattcttcctatgtcaatagtgaacaattgcagatcccctttcctttccttctcctttcccctgttcctctctcctccctccctgaatactcttgcttttttctgggactggtctagagcatgggtggccattgttgacctacaggaggcaccactgtcaccaacaaagggtaacagtctttcttttcaatatttatttatatccagtatttattttcaatactgactatggagagagctctcctgtgctcaaacactgcaatactgggggtctttcaaagcacaaaaacatatatttgcatgatggcatcattaacatttttatggctttctatttcttttttgtactggtctcaagagccactcataaatctctcagtaactgcatagtgtcccagggccagagaccggccactcctggcattgtgattagagtcatttaatatccaaggtggtgactaatgtctggcaacaaagcctccattgggtgtcatgtgtcctgggaccctgagcgtgggcactctaggagcacctcagtattgcgtgttagtactatggccgagagaatagttgagaaagtggtcaagaggtggatccatgtgaacgccactgggaaatgagagacctcgttcccaatcacggtcagtgcaactcgaaagcctaaaatcagtttaaaacaaaggtatctacctttatcttatgttcatatcctaggcttttaataatacgtatttttcacatgtttacagaaagcagtcaactgagctattcatggaaaggtttgtgggtttggttaacgaagtggaggagtattacatttcagctggaaacacatccctagaatgccaaaacatttattccaaagtctggtttcctggtgcaatcggaggcatggcaatgcctctgttcagagactgggggctagggccagtaaggcatttgatccacatgtatcccagaaggcttttattgttaaattatattctttcggaaaaaccacccatgtcctattttgtaaacttgatatccatacacttttgactggcattctattttagccgtaagactatgattcacagcaagcctgtttttcctcttgcttggggtggcagcagaaagcatagggtactttccagcctccaagggtaggggcaaaggggctggggtttctcctccccagtacagctttctctggctgtgccacactgctccctgtgagcagacagcaagtctcccctcactccccactgccattcatccagcgctgtgcagtagcccagctgcgtgtctgccgggaggggctgccaagtgccctgcctactggctgcttcccgaatccctgccattccacgcacaaacacatccacacactctctctgcctagttcacacactgagccactcgcacatgcgagcacattccttccttccttctcactctctcggcccttgacttctacaagcccatggaacatttctggaaagacgttcttgatccagcagggtaggcttgttttgatttctctctctgtagctttagcattttgagaaagcaacttacctttctggctagtgtctgtatcctagcagggagatgaggattgctgttctccatgggggtatgtgtgtgtctcctttttctttcaggacttgtaggattctttgtgccatttgcatataatttggcaggttcacattttttaagagccctatgaagtgctttttgcatgtgttttaaaaaggcatttgaaaattgaaagtgtgatttatggaaattaaatcatctgtaaaaaattgctttggaaagtaatgattgctggccataaagggaaatatctgcgatgcacctaatgtgtttttaaccctttatttgctgacaatctatagtcattaatgctaaactcgattttggcttcagctacatttgcatattgtccaacaatggtctatttttgtaagaattagataaaatgtatacttgatataaaatagtcaaaaatgtaactcttagtaacagtaagcttggcatttagatagaccatgaacacttcgtcagatactctgttgggtgtttgggatagcaattaaaacaaagtattgatagttgtatcagagtctattaggctgcagcaaaggaagtttattcaaaagtataaactatccaagattatagacgcatgatatacttcacctattttttgtctccttaatatgtatatatatatatatatatatatatatacacatatatgtgtgtgtgtatgtgcgtgtgcatgtttaacttttaattcagttaaaaacttttttctatttgtttttcatctggatatttgattctgcatatcctagcccaagtgaaccgagaagatcgagttgtaggactaaaggatagacatgcagaaatgcattttaaaaatctgttagctggaccagaccgacaatgtaacataattgccaaagctttggttcgtgacctgaggttatgtttggtatgaaaaggtcacattttatattcagttttctgaagttttggttgcataaccaacctgtggaaggcatgaacacccatgtgcgccctaaccaaaggtttttctgaatcatccttcacatgagaattcctaatgggaccaagtacagtactgtggtccaacataaacacacaagtcaggctgagagaatctcagaaggttgtggaagggtctatctactttgggagcattttgcagaggaagaaactgaggtcctggcaggttgcattctcctgatggcaaaatgcagctcttcctatatgtataccctgaatctccgcccccttcccctcagatgccccctgtcagttcccccagctgctaaatatagctgtctgtggctggctgcgtatgcaaccgcacaccccattctatctgccctatctcggttacagtgtagtcctccccagggtcatcctatgtacacactacgtatttctagccaacgaggagggggaatcaaacagaaagagagacaaacagagatatatcggagtctggcacggggcacataaggcagcacattagagaaagccggcccctggatccgtctttcgcgtttattttaagcccagtcttccctgggccacctttagcagatcctcgtgcgcccccgccccctggccgtgaaactcagcctctatccagcagcgacgacaagtaaagtaaagttcagggaagctgctctttgggatcgctccaaatcgagttgtgcctggagtgatgtttaagccaatgtcagggcaaggcaacagtccctggccgtcctccagcacctttgtaatgcatatgagctcgggagaccagtacttaaagttggaggcccgggagcccaggagctggcggagggcgttcgtcctgggactgcacttgctcccgtcgggtcgcccggcttcaccggacccgcaggctcccggggcagggccggggccagagctcgcgtgtcggcgggacatgcgctgcgtcgcctctaacctcgggctgtgctctttttccaggtggcccgccggtttctgagccttctgccctgcggggacacggtctgcaccctgcccgcggccacggaccatgaccatgaccctccacaccaaagcatctgggatggccctactgcatcagatccaagggaacgagctggagcccctgaaccgtccgcagctcaagatccccctggagcggcccctgggcgaggtgtacctggacagcagcaagcccgccgtgtacaactaccccgagggcgccgcctacgagttcaacgccgcggccgccgccaacgcgcaggtctacggtcagaccggcctcccctacggccccgggtctgaggctgcggcgttcggctccaacggcctggggggtttccccccactcaacagcgtgtctccgagcccgctgatgctactgcacccgccgccgcagctgtcgcctttcctgcagccccacggccagcaggtgccctactacctggagaacgagcccagcggctacacggtgcgcgaggccggcccgccggcattctacaggtacccgcgcccgcgccgcccgtcggggtggccgccgcgcccggcaggagggagggagggagggagggagaagggagagcctagggagctgcgggagccgcgggacgcgcgacccgagggtgcgcgcagggagcccggggcgcgcggcccagcccgggggttctgcgtgcagcccgcgctgcgttcagagtcaagttctctcgccgggcagctgaaaaaaacgtactctccacccacttaccgtccgtgcgagaggcagacccgaaagcccgggcttcctaacaaaacacacgttggaaaaccagacaaagcagcagttatttgtgggggaaaacacctccaggcaaataaacacggggcgctttgagtcacttgggaaggtctcgctcttggcatttaaagttgggggtgtttggagttagcagagctcagcagagttttatttatccttttaatgtttttgtttaatgtgctccccaaatttcctttcatctagactatttgattggaaatatgtcagctatgatgatgactttctgggaagcgattcctgtcacccgctttcccctcctccccaccccacgtcctggggctttagagagcgattgggagttgaatgggtctgatttcggagttagctggctgagtccgcgctggagcggattgctggcatgtgacttctgacagccggaaatttgtaggtgtcccgcgagtttaaaacaagccatatggaagcacaagtgcttaaaaataatctcctgccagcccagtgacaagcctgtcccacccggggagaatgccccggagtggcgtgcgggtcagccagggtctgcgcctcgcagccactgtggaaggagcgcggccggtccaggacacaggagaccactttgtgacttcaatggcgaaggttgtgtgtcctcattttaatttttttccctacaagaattgttctttctccctctcctctccctcccattttctcttgcccagtttctccttttgttttttgttttttgttttcctgatgggcctgcagagggattaggtgggcgcttctggtgaacaccttcctaggtggccacaggacaggtgtaccccggactgggtttggaagcttcagggcgccacatggctgggtcctgaattaggcatttcccaactgtacactggtatccggactggtgtccctatatctttctgccttgtaagccgtggaccagtttttgttcagtattctgtttccagggatatttatagcagaaggaaggggactaaagtgcagtttggccccagaggatactgaagggcagattctgggggtattcagtgtgcatcttcagccgccttggagaaatttagagcatcccacagccacgcagatccaagctgtctttactcaaaagacaaacaatgaacaaaacttttaaaggttggcatatttcaaattaattttacttgttttaatttagggttaaaacagagaaaaaggatttcttctgcccacctttttttttttaaatggaagaacaaagtacagcgattaagtctaattccacacaacatttaaaactgcttgatgtgaaggaaggcactggtatgatgtgaattccataaccttatgatggactccagaaaccattttcttccctatttaattttcagttcttttattgcaaattaatgctgctgaatttcaatgggcactaatgagactgctccttggtagattatttactgccttgctaataattacaaagtgaacctggtcaaatacagaggggatcgcatcttattcaaaattgttcatcatcccagtgataagtggtatcagtgtaatatgccctatcttacactttctgcattacatgatattcaaacactcttagaataataaaaaaagagacaaggaacttaaaaattaaaaaaaaaacttgcacaaatgggactctgtgtggaaattcagttttagaatgatttttcctgtgttttatttcccggattatctttcctcttttgttagaattctgcctgttattatccagcaaggaaaagaagcatctatgcaagttcttcatatggacagatattatttagtatttttcccctctcagtttttctgcttaaatgactctgggtataaaggaaaggattgattgggctcttttaggaaactttaagtttcttaagtagttctcaaaagttttggggctgaaagcagtgttttcaaactgcttgtcatgacccagagggtcatgaactcagtttagtgagtctagaatattttttaaaaggactaaaatggaaaggaatataatagaaaatatcagagtgcatggtatttcgtaaggataagttttgtttcctgaaaatctgttttaattatatgtgcttctgtgtgctgattgtgatgtaaaatgtatttcttactgtggattgaattcaaagaaaaaattagaaagctaatggcctaaaatattatatgttcagtagaaaacaaaaaattcaggcaagtggctggttgtttttacctatacaaatcaaaaggctattttgattgtcttcattttccccttataaattaggttggtgtctttagtcatttaggctaagttttactatctgattcttaacttttctattgtagaatggtgctgtcatgtggactgtcctcccgagtgtcccactggatgttcagagaatttatgtgaaggtcacgtcatttagcattgagatgctgtggttaccttcttccatttcttccataatatgcagccacatctatgtgtgaagaaatgtaatagataaaatttctctggacgcataataatgtgagaaagattgtcacatgtcccagcaaattgttattaatataaatttgttacttggcaagctgagattttgcaagatgttactcaaaatttcacaatgaaggaaacagggagtcatcttatcctgggttccttttttagatttcaaacaacttaggaactttgaataaaactaaagatgaagcttaactatatcaactatcctttttaaagttctaattaggaatttaatgctgcatgcttatttcagttttattactcagtattcttaaaagttagacgtctctcacttctccaaaaaacttggcaaatgtataaatcttttgcatcaaaatcaatgccctgctaatttgtatcctggccatctgcatattttggacaactaatttttccactggtgatcatttgaaactctttctcaactttgaatagagactgatttccaaagtgagatttaagtgactaagtttcaagtttccgatacatttttccttttacttagataacatttcagcccccttcctttctgatcttacttttttattaatttaaattgttactgattacgtgacactttgtgctggtctaagaatagtccagagtcacatattccctggtgaatgagcatattttcggatgaaaacggaatcacatcttcaatccccatttcattttcacctcctccatgtggcttgtacctgtttggaagaaagctcctgaaggataattgccacttattctaatctttctcacactcatttaatttggatccctggctaaagttgttatttacttttgtgattatacttagtctatgacattcataatttgggaaaattctcaggtttgagaattttggcggcttgggatttcttttagtttcttatagttttaaggatatgtaagacaggtgtaagaaactgccaaggggaggaaccatagatatcaggaaaaactagaaaagatgccagacttaccattaatgaatgatgagacaatagtaactttgttaagtgagattgtatatgtgaaagtggtatagaaactaaacaaacattaggtgtttttattattttactcacatgttaatatttgttttggtgctttcataggctaaaaagctgggaaataacagatttaagtggtcaggaattttgttataaatatagaatgatgattatatgaaatcttttcctgtgaaagtcaaatttaagtaaaatctttatcaccatctgcaacatttgtctgcagcctggcttaccaggttatcataaagaacatttattttacagatacattaaagaaagtcaaaaccctgattatgtgtaaacaattttacataaggaaatatatgaattttaattatatttttctaaaatccgtactcagcatgaaattaatacatcttaacccctccctgtgacttcattattatttttaatgtaactttagaagaacccagtagagagagcagcgtgctaagtgtgtttctttcttttccagacaactttgaatggagaggagcaaattagtcttttggtttaattctgtctcagtttgcttatctaaagaaaggaaaacagagtggctacacttgtttagaaccatatgcatactccagagaaagatgctctattaatccaaaaaatacagccacttgaaaccagccaaagcgaaagtgtaagggacttcatggaaaggaggcagttcaccaaagttattgaggggttttatattttaaactccgccagtgaattgacgtgtaatgtcacttacaaaaaaaaaaaaagtatgtctgagctgttcgctacttcgtctctaaaatatactcatactgatctctgaaatcccagaatttaagtgggctggaggttacgggaagcacctttataatatccttaatctcatgagggaagaaaccataattgctgaattctctgccttggataatatcaggagggactctgaagaaagttttgcagtaatcaacaatgttttaaattatgtgtatatttttagatcacctcaaaaaatataggaagcacagaatgacaactattctggtctcaactgacacaattttatgtagtttaataaagtaataatttcaagaaacgtgggcaaataagaaagagtatgactttcttacaacccgcttgtaagtgatgtggtggtggtaatgatccatgattttgatgatgacgatgatgatgaaaatgaagtttttgtctcagtttgggtaggtggtatttctggatgcctcctatggaccctggagatgttcatcctatacagaaatccaatcctttaaatctacttggctcattgttttagaattctaattccatagtctgaaaattttaataatgatattaccaataatattagaaacttattaagtacctataattgctatacaaaaaatttaaaagaacccaaaattccaagcaagactgaaaattttttgtctctcctctgaactatttagagggacaaattagtttgttcttataatatctactttaaataaatgtgccatctttaataagatagtagacttctttgtttggtaatgttctattttttggagatcctatgagttacacttgggaaaattataaaagttcacttaaagttaataaaatccattaagtaatgttcagaactagacatttccaaatgagcccttgaaaagctcaggtgggttctttttgagagttccccaaatgttgtcaaccccaggaggaatggaagacctctgcagttttgttattcagattctcatctccttctcagaagccgtagaactggccgggccctaaggtccacgctccttggttccagttctgtcttccatccttcggtcccgggctcattctgcctgttcctaaacggtggcaagttaggggccccagcagccaacttgtgcttacctggcactacttcctgggcagttttcttggctccttgacttgttgggcggcttgggatttcttttatggccctgaaagcaaaagacaatgttctcttttagtttcctgcaattaaatgatgttagaaatagtcatcttcacattggcgtacttcctctttcttctgtaggtcttttagaattttgagtccattctcatattttcttgtttcatttgctttattttctaatacatagaagtttaaactccctttaaagagtttttggcctcttttaccctattaagctttcttttttcttttctgttttagttgttccatctgtgtattctcagatatttttctttcaccttttctggtttatttctttattgacctgtctcatctgttattttaatgaaatttggaacagggctaaacagagttcctacctcagccagtataagaatataccgtaataactcagagtggtattaactagattaaaagtttcaaaaagtgatgtttttcttgtctctgaggatagaaacttcaacaaaataaagaagaaattttcaattagtagaatttctttgaaagtttgttcattcattcatttggctaccttattccaaattgagtcattcattgagggcttagactatataaagtgtggttttgttttcccagcagttcatgcaacagcattgcacctagcagctgggaagtcttatagcatgaataggtgagattctaataccagaatctcctgcatgtgtaaactaacagtgtagtcttgactgttgtctcccagtaaacttggtttcaggagttttagatccatgtgaacgtgtacaaggcatttttgctaactgtaacttcccacttaatcaacaaaaacaaaaacactcatttctgaacattcagtgcattcatgattaatcttaattacaccacaaaggtatttttcaatggtgattttgcgggagtggggtaacagtttcgaaagcaacattgtcagaaacatagttgattttaaaggttctttctggtgactttgacttctgcttttttagaagaccttacacagagttgtatttatttctcctggaatatttcaagcaattcagagtgaaagggtatacattccaatttgcgtatgagataaaatttagttacattgagaagctattttctttagttacagggaaaaaattgtagggcttttggaagcctctttgatttctaataggaggaatccctgagcactggtccaaacagaaatcatctcttcttcattgctgtatttccctcaagctcttagcaaagtgcatggcacgtgaaagcccggagaagctgttggttgaaagaatggatggtggtgggcaggaagcatcagggacatggtttgcttcagtctattggctgggagaaaggccatttaggaagggatccttagatgccactggaagaatgtgggaagtttgtgaatctctctttctcaggaacaaaagtagaaaaaggactccacacagcattccaagtacagtcggccctcattattcatggattctgtatttgcaaattcgctgacttactgacgtttatttgtaaccttcgagtcaacactcacggtgctttctcagtcctttgcagacgtgtggaatggcaaaaaaatttgagttatatgacgtatatgttcccagctgaggctgagcaaggctcacttctccttgcagccctcagactataaacaagtgtccctcttgctatctacttcgtgttatgatttttgcattttcataatccctgttgatgattttgctgtttaaaatggcccctaagcatggtcctgaagtactgtctagggattctaagacaaggctctgacgtgtcttaagagaaaatacgtgtttgataagctttattcaggcatgagttacaatgctgttggccatgagttcaatgatggtgaatcaacaggatatattaaatacagtgtttttgaacagaaaaacatataaaacaaggttatgtattaatgagttggcaaaaatgctgtgaccaaaggctcccaggaacctaccctattttcccctcaatgcaatggttcagtatttgctaattcagtgtttgaggtgactttatagaacatgagtaccatgaataatgagaatcgattctgtataatagagtgatgaaagcacaggtctgggagccagcagctatatttctattctggcgtgactcctgtgtagttgtcatcactggcaaattgcttaactgtgtgcctcagtttcctaatctgtaaaagctacatcgtttggatgatgtgaggattaaacaaattcatagatgtctagggcttataacattcctggcacataacaagtcattattttttattactacttcggaagggaattgagtactataccctgaagaaggtgagtatgggaattctctacgggtctggaatgtccctatatttgtttattttgccttcaagtgactaactttaataccctattgtgattagaagttaaacttctgcaaccaaaaggaagcaggaagctagtatttcttgaagtgcttattacatgccaggtactgtgctacaaaaacaaaacaaaacaactgtaaaaaaaacttcaaatttggctgcgtgcagctgctcatgcctgtcatcccagcactttgaggaactgaagggaggattgcttgagtccaggagttccagaccagcctgggcaacacagtgagaccctgtctctacaaaaaaacaaaaacaaaaacaaaggcactccaaatcagtaaaaattaatcaatcaataaaaagagtgaggggcattaagtattgtggactgaagcaatcccagagagggaattaattgaagctgaggtaagcagcttatggagaagctatgatgtacagagggcaaggaaggaatttttctgtaatttggaaaaatgggaactgtgagaaagaaggagttggaagctcatacttagggagcatctacaaggacgtctttttcacgttggttggaatatccaaatcaaggattatttcagaatcacccagatgattaaaaaactactgagatccaggttgtatttcagcagttctgacaattgctctgggtcgaagcttgaatcagtagttaagaaaaacaacaaacaaaacaaattttggggcttttctcactgatttacagttaaagctcatttactcttcctatgactttagatggaggatatttccaagtcttcaggatggagacatggagggaagtgagactagtgatgtgcctcaaggttttgctgttgttctaaccatgaggagcactattcaaacccaggtctgctagatttccaagtcttcatttccttgggcctcttggatttcagaagcagagggtaaaaggagtgctggggagaaagatcacagtagctttcaattctactcctcagctttccaaaataagtttcaagactggccgttgcatttgatatggaataaatacaaagaaggtagattgaagggtatgaagatgcagatttttgataccagatatgaagataacattaggaagcaatctaaaacatggacacaaacacacacctgtgccagttagcctgtataattcgatttttgttaagtgtttagataactgaaggtaatttaagccctcatatcttcccttcatagggttctttttccctctggttcatcagagagttgccaccaattcaggctgttagtggtacacataacctctagcattgttgatacagctataaaatcccaaatatcagtacaattgttgattgcataaaatttccagttgcatggttggaaagtcctgtaagtttgaatccttaaaccagtcttaaatgtggaggaggactcaattaaagctctcctcgtgtcctccctctgacgtatttgcaaaatcctttccacaaatagaatactgtttttaatgcttccccagtccaattttgcgttgtagaagacgaatttatggatgagggaagtggcattcaggcactccagcttggtatagaagcccatggtgtctggtcctcagtcctcaagcccgctcatttcctcatgtgaactcagaataagcagctgaaagcaagtcttcaaaatctcagagatatgtataaatgcaagtgtttgggtgagaagtgaacatgggtctcctctagtgcccacactacttgactaacaggttttgggctccacacaatgagggattatcaacccctgtcccagggctctctgggtcttggttctttgtttttgatgctcagcaattgtgatcagtgaaaccaatgttgcttttctatcaagagtccaacccttttctaagaagggttgtgtttgatattagggaatagctagcaaagttatcaagtaacttgtagaaacattcttttgcaagagttcttatactgaatgactgtagttgacagcagtgcagtactggtcattttctaggacatcttaaaaacactgatgagaagtttcctctcagatgtctgtcatgtcattcttgcctttctctacacagggtcagttttctcttattgctgttaggagttcctcattggtttttcagcttttgggctttcaaactctaattaatcataagctactagagtgtactacctaaagtgtgtatatacacatatatacacacacacacacacatatatatacctggtatacatatatatatataatatacatatatcatatatactccccaacctgatctggttcttcctctgcataaaagacctcaggccagtcagagaaaacatgtatgttccatggtgtggcaatcaagcccttgtatttggttccaatcagtctcctaactattactccaagaagctcttgttgaaagagccatgtttaaatggcatgttcctactttcttcttcatagtgatcttcatctgtaccatgtacccttctttcttcttgttccatctctgttaggctgattctacccagaagtcaaggttcagctcaaatgctatccctatcaggtgaattttccacctggcatttgttcggtgtgcattgtgtgcatacagcaccttttcccggtacctttactgtaatcaccagataattcctttcattttagttgtaaatagagttgtcttccccctctatggaatagattttattaatgtatagagcagcagtccccagcctctggaccatggactcgtactggtttggggcctgttaggaactgggccgcacagcaggaggtgagcagtgggcatgcaagtgatgcttcatctgtatttacagctgctccccatcgcttgcattatgcctgagctccgcctcctgtcagatcagcggtagcattagattttcataggaatgcaaaccctactgtgaactgtgtatgtgagggatctgggttcttcttatgagaatctaattcctgatgatctgtcattgtgtcccatcacccccagatgggactgtctagttgcaggaaaacaagttcagggctctcactgaatctacattatggtgagttgcataattatttcattatatgttacagtataatactaatagaaataaagtgcgcaataaatgtgatgcactggaatcatcccaaaaccatccccagttccatctgtggaaaaattgtcttccatgaaaccggtcatggaactggtgccaaaaatgttggggaccactcttataaggcatattagagtaatttcatagatttcctaattcatttatcatattcattcactcagcaagcattactggatgttgatcatgtactggctttggtggtaggtgcagagattgggaacattgtcatcaaggagtttatggttgagtgagggagatgacaagtggatagacaatgaaaaaacagtagaataagaactgtgatagaaaagagacagccaggagcattgaggagaggcacttaaccagatggaggatcttggtccattgatatggaggtcaaaatggtttaatagagcaagtgaccctttcaactgaattttttaagaatgaggatttagccagacaaagaagggcaggtgaggttgtgaagaggaactgagtggtactcttcagagctccagcccagttccttggacagaataaatgcttactaacttatagagctgaatattgaattaataaaataagggtaaactgttaagaatcagagaaataacttaaagaacactgatagctagtgttttttgaacaccatgtacccaggtgccttgccgaaaaccttaatgatcatcttgtttaaaccttacatttctcataagaggctggtactattgttattctcattttatgggacgtagaaactaagacttggagaggggaagtgacttgcccaaggtcatacaaccagtactggagaattagggattctagatctagaatttggactctggagcttaaggttttaacccacgacattatgcagagaaattgacaggatttttctgttgctgatcaatttacttggcagttagtttgttacttccttgtctttattttagttgtgacaatgctttcatcttagactgtgtcccgaggctgctgcttttatttttatgggaaatggctatttttatgatccttgctaaaagcatgtttaaacaattttccattaagtagggggatgtttttccttctaatatcagaagccaataaatgaaattctacaaagacttgctggtagcaaccttaggaatttctttgcatgtgaaacccatctgagaacttaaaatctgggtaaaattgtagtgtaatttggtgcaatcgtctctttgcacaaataacatcataaaatcatagtattgtcatctaggaggggccttagacatgatggaatcctaccttttatattttccaggtgaagaaatcaaagtctagaaaggtgaaggaacttcccccaaagtttcccagctggtagagacagaaccagggctaggtcctctattctgactcctgaccactacctcacacctaatagatggaggcatgcccagttcctgttcaccgagggcatcagaccatgccatactcattgctactgttccagcatttatagtagaagctcaagcaagcaggatgacagaatacctaattctggtcactacaacattataatgatggctaaagtgaatgccccagccatgcttgtctagacaggccatctgtttaattggtatatggttcacgtgagaatttttaacctctgtttgtcgagtcggtgttagttctctagtgatgaattatttcctatacttccatttagattatttactcttaatttaataaccatacattgtttactttggtattgaagattcccttgtttttcttctttttttctgtttccagggcttaaaggttaggagtgaccttgccagacttccctggagacttacactgtctcctttcagatttctgaagcagttgggtgctatttttagtccactatcaccaatgtgaaaatggaacttgcattatttcattatagatatttcactttagtattgacagaattaaaaaaataatttgatctgtgcttgatctagcagccaggttacaatagacatttttagttacctggtccacatgttgaaaaacatgtgtcttctctgagactaatgactaagcccgatgttggttatatactgtttactattaaattttccccttgtagtttaatattgttccaggaaatgaaatgaaagtttaataagaatggcaattgatggacccatatgtcggaagtataactaatgtccccgttacatgtgttaaagaaaggcatggctggtgggttgtaactgtactacaccaagatgatttgacacaacttattctacagagatatatatttatcaggatagaatttataactaaacaaaactatagcattttttcactttgattttttttaaatgagtcaaagaactgctagaattgtcagttaaaaaattttaaaaggagatatgaaaaaatcttacaattcacaatgctgtaaagagataatgtagggattaatatgttcttgatatcaatattttatgacttttatacatgtagaagcaaaacaatttgaggtaggtgaagttagtatggacttcttgagattgtccttcacatttcttttcctttcggtgaaaaattgaaggccaaaatgtattttcttctggttttgaaaatactgtcaagatccttgcaacaaaatgagttcctctaaggagctgaaaacaaagctcactcccctcgtgatactctgagaggctttgctcagcatcctgcattctggtgattccttggagacagatgatgctaaacacaggaagattaggtcaatggtaactttttctaagtcaatatttcttctccttgggagatgatcattttaaatcttcccgaagtccaggctaaacctttctaattgaatctccatgaaggagagctccagcaggtggagaggaagtgagaaagagaaatgaaagctgcacgcctcatgacgctgtgccagggagttcttaaaggtgagggagtttctttttggtaacctaagctatgtgaatcagaaggttcattagcttgtttctttttcttttttgtaaactcctacataattttagtaaacaggaacagtaacctaatgtgatatcccactggcccaagacttagtgcatcttcaaagttgcttaattatgtccgaaacagacttttgtctcttgatgagaaaagcatggttaaacgtgtgatgatttcctattgtcctgagctcagatctgtaattgtggccagattcatgcatctctgctgccttctcttagaagaatcatatgtaggcttgtcagataaaacaggatgcccaggtaaactggaatttcagttaaataacaaataacattttagcatgtcccatgcaatattatactaaaatattatttgttgtttatctgaaattcaaatttaattgaatgtcctgtatttttgttggttacatctggcagccctagccatgctgcctttctgcttaatgggcttaattttttgaaggctggaggttttctgttatggtgcccgtttccacctgcttttctaccaggaaaggaggcatgctgatgtagaatttgcatccttatttttgtcattattattgattataacagatgacataggtttagattaaacctacaatgacattgctgtcattcagataattgtaattattgctaattgtaaagaaggataattttttttgaaatgactattatttgttttttgtttttgtttttgtttttctttttttctaattatactttaaattctagggtacatgtgcacaatgtgcaggtttgttacatatgtatacatgtgccatgttggtgtgctgcacctattaactcatcctttacattaggtatatctcctaatgctatccctcccccctacccccaccccacgacaggtcccggagtgtgatgttccccaccctgtgtccaactgttctcattgttcaattcccacctatgagtgagaacatgcggtgtttggttttttgtccttgggatagtttgctgagaatgatggtttccagcttcatccatgtccctacaaagaacatgaactcatccttttttatggctgcatagtattccatggtgtatatgtgccacattttcttaatccagtctatcattgatggatgtttgggttggttccaagtctttgttattgtgtatagtgccacaataaacatacatgtgcatgtgtctttatagcagcatgatttataatcctttgggtatatacccagtaatgggatggctgggtcaaatggtatttctagttctagatccctgaggaatcgccacactgacttccacaatggttgaactagtttacagtcccaccaacagtgtaaaagtgttcctgtttctccacatcctctccagcacctgttgtttcctgactttttaatgattgccattctaactggtgtgagatgatatctcattgtggttttgatttgcatttctctgatggccagtgatgatgagcattttttcatgtgtctgttggctgcataaatgtcttcttttcagaagtgtctgttcatatccttcgcccacttgttgatggggttgttgttttttttcttgtaaatttgtttgagttctttgtagattctggatattagccctttatcagatgagtagattgcaaaaattttctcccattttgtaggttgcctgttcactctgacggtagtttcttttgctgtgcagaagctctttcgtttaattagatcccatttgtcaattttggcttttgttgccattgcttttggtgctttggacatgaagtccttgcccatacctatgtcctgaatggtattgcctgggttttcttctagggtttttatggttttaggtctaacatttaagaagaaggatacttaaagtataagggaaaatgttacaatgtatgaagggaacatgaagaaatagaatctggtaaaaaagagttcttgcttttgggaggccaaggcctcctggctaacatgatgaaacctcatctctactaaaaatacaaaaaattagccgggcgtggtggcacacgcctgcagtcccagctgcttgggaggctgaggcaggagaaccacttgaacccaggaggtgtaggttgcagtgagccaagcttgcaccactgcactccaggctgggcaacagagcgagactccatctcaaaaaaaaaaagaaaaaaaagagttcttgctttcaaaactatggattaggtaacttttgtgaatgagtaagatcatgagtattataaaaatagcacctttcttttttgtcttggggaaattatcttattttttaattggatttcagaaaagagtatttcagagaaataaatctctgaaatgctttttgaagtgtgaaagatttagaagacaaaagcaaacctcctgtctagataaacattaaagagatctgccctcccctcctctacctattcaggttgcaacactttgggggtggctgccttggtagagcttgatcgtgactctggtggcttgggagatggcatgctgcacaagggattcatggttacagcgggcttgtgggactggggctctccaatacgtggttgggtttgtaaagaaatcagagctatggtgtgaacaaaaggatatgcatgggagacagtgagacaaggaaatgctccagaaattattggaatataggtcagataactaactgtacttgtgccattttctgggggaaaattctctgaaggctttttgggaaaagaatggaagtgagaattctcaggtcctcaaaatatttccttttactcagtcctaacctgaggccgttaaagaattcccagagtcacgatggaaggcatgtttgggagtaagagccagagtgagggttagaaatgtgttgttggccaggtatggtggatcatgcctgtaatcccagcactttgggaggccaaggcaggtggaccacctgaggtcaggagtttgagaccagcctggccaaaatggagaaacctcgtctctaccaaaaatacaaaaattagccaagtgtggtgacacgtgcctgtaatcgagctcttcgggaggctgagacaggagaatcacttggacccaggaggtggaggttgcagtgagccaagatcatgccactgcactccagcctgggtggcagagcaagactccatctcaaaaaaaaaaaaaaaaaaaaagaaagaaatgtgttttccagggttctgggtacttaggaatttggttgcttttgcaggtggaagtggaggtgactaggtaacagctgagtgattttgccccagttggacatgagccaggttgagcagaaagccctgggatgcggggaggggggtggcggggaaggaattgaaagttggttgtgtggtttggctttggcttcatggcatgctcacaccttgcttcgcatagcatgcttagactacagcaggagcatcaggaagtggatttctgagctcaatacaaaaagttataaataccacctataagggcaataaagatatatagttgattttcttctttgcaaggccaaatcttataggaacataagagcgaatgagttacagcctgggaatttgagccttatattcagagattttaggttgcttctgattccgctgtctagacaaaaccatgagaggatagtgtctagaaatgagaggaagctcttccaatgcagaggctagaatgtgtcagcctgtgctgcgaggcctgggatagatgtttctgaaaagtaaaagggcagctttcctactggatacttgatcctcaggctctagaaaactctgctttattaactttgttgacttcctaggcaccacatgggatccttgttcttcctccttgtaagcagtaattgaaatcagtttggcagcctggtttacagtgaccatggtggcttgtctcccgtgctcttacctcactctgttgatgttgtaaaacctccagctaacttcatggggtggctgacccacgttgctcatttattcattcaacacatattcattgaccatctactctatgccaggtattgttatcagcactgggaatagatcagtgaactattgatctatttgtctaatgggacaaattgacaaattgggaaagattccattacacaggtgacatttaagcaaagtcttgaataagggagggaatagtaccatgagatatcctggtgaaaagcaatttaggctgagggcacagcagggaagaggccctgatgtgggaacatccctggtgtcttgaggtacagaggccagcatggctggcacggagtaagaagttggaggtgccgggcatggtgactcacacctgtaatcccagcactttgggtggctgaggcagatgggtcacctgagcccaggagcttgagaccagcctgggcaacatggtgagaccccatctctacaaaaaaatacaaagaaaattagccagatgtggtagcatgcatctgtagtcccaattgcttgggaggctgagatgggaggatcaaattacttgggaggctgagatgggaggatcacttgagtccaggaggtggaggttgcagtgagctgagatcatgtcagggtgacagagcgagaccctgtctcaaaaaaaaaaaaaaagaaaaagaaaaaagaaaaaaaaagaagttggaggtgagtaaggagaggaacgtgggggacagagtcctcaggactctggcttttactctgagtgagtcgaaaatccaattaaaggtttgaaagagaggaatgacctgatctgacattttattgtgaacgttttcaaatctttacagaagtggaagagcataacgatccttcatgtacacatcgcccagcttcaactatgatgtttcatttgtaaatatttccgtctacacttccaaaggatgatgactatttttaaaagtccaactataataccattatattttaaaagttaaaacactatgtctttaaatatcaagagtttgtattgattcgcactttgaaggtcgagctgatgaaatttcctgaggggttggatgtgacatgagagaggagtcaagtattgcatggtaattaaaaacctttgcagcatagtccatttaccgaaagactatatgtatgcacttcaaagcaggttttaaagattaacatcaagcatctggcttcatgagttttaacttcttttcataaatgttatacaatgtcatcatctctccagctagagaaaatgctattattcttattttcaaatgaggaaaatgacgcagaattatttacatattatgtaacttggtcccaagtcccttagatactggtttagaaaatcctagtaaactggaagtgacttatccaaaattaaaatttattttgctctattgtcttttgttgcctatgggaactttgtgcaggtaactaggcacatgtcaggactgatttactgacctctcaaggtatctttaattattttgggggatatcacggaatgagttctacacaattcatttgaatcgaattgaacttaagaaaattcaaatgatgcattggctgcctcctatttattacatgctgctcataggcataacagcatagtctaacaagtataaaacctgtgtaactgtagctttcagtgcagtgtgatgagggctgagaagatagtggtacaaagaagagaggtagcagagtgaagctgagtcaatatgatgaagatttctctagacttgaaagggctagaaaaggttattcttggcaggaaaaaaacatgagccaaggcataaggataagcacaggcatggcagatttgggaatgtcatgtaatttgttgctgggctgcaaagtacatggaaggggagtgaaggaacagaaggagatgaatctggagggagaggttaaagtgttccagagagcaatatgtaggtgttactctaagtcaaagaggtcgtaatagcatgtccagactccaaaactctaaacaagtcatagaattgctgccttggtagggcatatcacacacatcaacccaatcctctgtcaccatgacatccatataactgcaactctatacatttcccagcctatgttcccagagtctccagatgacattgtctgcaaactgcactgcagaaggctctgctatgtcttcttaaaagtaagcaagactgttttcctttgttacatgagcagcaaaaggatagggtgctctttgacctcacttactgtagggtggataggaaagtcaaggaagagtaacccagaagatttagttttaactttcgcatcaaagaggtcccttagcatctgctcagagatgtcacaatttctggtgtgtgattatgtttaagaattcggccttgccactgttgaagttgttctgtggaaaaagaacctctcttaattttacatgatgcccaacttctcttttattccagaatcactcatatgctgttggactctttccagccatgtgtgctaacctaggcaatgtcataatagatgaattatgtttactttgtctttgatatctcagctcttttatcttctattcaagttcccacctccatcattactgatagtgttcgttgaacaaagaatatgtcagatatacagaagtgtttctccccttttctctgtctctcttttccttcctttcctttagtttcctttctctgtctgttttctgatgcctcattttagaaaagtgattttttttgtgggaaaatcattttagcattagaaacgcaatggctatcactgacagcttcctctgatgaaacggccatttgtcatcattacacggtcatgggagtgctaagaagacttaaatgcagggctaccaccccttcccaattcatcttttatccattttatttctctaaggaaagggtttgaaaaatgggctttgccctcttggatgcagtgaagaaattctagctggctacagatgttattgttggtcggaggcaagggataaaatcatggtcacaccattgtagcgccagatggggaatgtagcaaacatagttgtaatttctcattttacagatgaagaaactgaggtgcagaggggttcggtgacttgtttaaggcatgtaattgttattggcagctttctgttcagaacttaagagtatgagtcagtctagatcttttcatcacaatactctgctcctcttactttttcctgaaatttgtcacattgacagcaatgtgatccctaatgacacacagattcccaaataatttttgtagtaaaaatttccatttgcaattctggacatgtgtgtgtgtggaattttatgtgatgacatattggtcctatcttttgaataggatcataaatgaaatgacttatggatcacattcaaaagcaggccaggggccaatgtgtaagcaggtgggttttcatatttggagttctgtacttttgtgttagtcagtgggtctaggactcttgtagtgtatttcccaagggccaaagtcttctgccttgaggtgtcagctttccaaggcagaggctggatgctttctcttccttctgggctcctttctcttaggcttcccccttctcttctcctccatttgtatctgtcctttttctcggtactttccctggctggtctcagctagatgctcactcaatgctgttgaataaatgaatgaatttcgtagtaattctgcaggtaaatcaagttattgtctcccaatacggtgctatgctttctgaggaaattagactggaagtcaggctttttaaaaaagaagatgtggtgtcaaattgcagctctctctctctctcgacttaccttttttctatcatccatatgccttctttcttgtatctttgggttcccagacctcaccattcattagcacttggaatggattggtaagaataaagaaaggagaggtggtgaaactcagcttgggtcatctggttacacattagtaactgacaaaagataaaaagatacagactaaatgggtttttagggaactttttccagtctattcttgtttcccattagtgtgaaaaatcaacacttgcttgtattttggggtgaagacatttttcttaagtgagtgggaaagcctcttgacattttaccgagagccttaaattttgaatggtgaatgctaatgttctttgtgcataaagaatttcagaacttgtatatatgagcattaatgatgcatcattttctatttgtgagttaaactaggtattatctgtaatcatatttttaggaaacattcaaactttcatcaagtcattctcttatatgactctcagctccattaactctgttttcatggaactcaacagagttcttaacgtttgcattataaattaaattagcatttcccctcaaagaagtattgctgtccttacaataaataattgtagacaatttcttttcttttcttttttttttttttgagacaggttctctctctgtcacccatgctggagtgcagtggcacagtcacagctcactgcagccttgacctcctgggctcaagcaatcttcccacctcaacctcctgagtagctagaattataggtgcacaccagacctggctaatgtttaaattttttgtagagttggggtcttgctatgttgcccaggctggtctctaactcttgggctgaagcattcctcccaccgcagccttccagagcagtgagattacaggtgtgagctaccatgcccagctaattgcaggtgatttctaatgggatttagtatttctgggtttaaggatgagatctgaggtaatgactttgtttccagatgtgaaataatttgctcttgggttgtgagccctttgggtgggctcccaaggatcctgctctcttccaggagcccaggctctggggtcagactgcctgggtccttgactccctgttttctgattgtacaactttggtgagtggcctaattcctctgtgccttggctaccttggttactatttctaaaacaactggtgttgtagtagtactgcttagagtactttcaagggttaaatgaattaatccatgtaaaacgcttaaaatagtgcctgccacaaccatcaatttagtgtgaaaatctgctcacctgcttggccagcccctttcactttattaaaccaagggtcgtgctgggttttccagaagtctaagttgcggtctaatctttgtgcagaagctgaaatagcagccataacgttctccctagatgatttcgtggagcttctttgaactgtatctatctccagtcatttttgtggaagaaattttcttctgtactttttagggatgagaattacctgccttggtttattaactaaaagacaccatgattacaaataaaattaaataaatattgtatcactaaatagataatatgagatagatgtattaagttttcagataaacagtataaaagagctagagtaatttgtaaaaagttgggaggacctattttgtcatgcaggaaacaatttttaacttgcctaccccagaacatagctaccacatggttagggtttgcccaaacctggcccaggagtcatttaccttgagctttcctaaaaaggaggatcaggattttcctctccagactctatcattttaggtagagtccttcttgtcaattctttttaagaacatacatttacttttgtggaaaataaatagatacaaaataaatacatacaaaattgcatagcaattagaaatacccaggaggtatgttatggtcacagacacaaactgcctccaacttctgtccatccatagtgatatttaaagcagagagaggtacacaggtaaccacatttagatggactgggatgttgccacacatacaagcattgataactggcttctcattacctgaatacattcttctgtcagagcaacagactcagctatgcttctggcaaaattgttcttaattctctattgattaatttattcggtaagtatttattgggtattttctgtctgaaaagtgcgattccaggtgctttatgtgtctctgtgtgtgggtgttatataaatacttataatactgtatccatactcttgaaaagcttagttgggaaggcaaggcatgcaataaggaacacagaattttagtcattccacaaccatctgttgaatggctgctattgttagtatcgtggtggaaactgagaagcaaagatgactataataggatctcttttctggagatgcacagtggacacgtagttatatgatgatgataaggactccagaatagttctatacatgatgctctggggccacatgcagattctgatgagaaacaattaactctttttggctgctacctgagaaggggtaattgtcactcaggaggtttttgccttttgaccaacatagaaaggagtgtgagtgaaggctagaggtgtactaacttggtcagggcagggtgacacataaaattaaccatcacagggaagggtagggctggagaggcagactgtggccaggttacaatgcgctgaggctaaggagactgtgtttatcctgtaggccagtgggtcttactctgaagtcttttgggtgggacattcatggacttcaagagacctgtgaatgccctaagattataagtaaaatctgtgagtctgtaactaaagctaaagctatttttctggggcccaccatctaaagaagattctgaagccttagggtagccgtggaggagacatgaaggtccattttgcatggtagaaccctgcctggctcttgctgcagtgtgggaggacaggtttgcaatgtggaggtgtggcaggcatggatttgggaggattggcagaggactcaccatgtccatacactcactgagatggcaaatatttattaatcatccaactgtgtatcagacactaagaataagctgggaggccatggcaagtgaggtcaccacagtccctgccacagtggaggttatggtatacaggtaaggcagggaagagcactgcaaagggtttgcccattgcatcagtcatttatttatgcacatgttgattcaacaattatttctatgccaagctgtcttcaaggtgctggaggaaatgaagcgtacatttcactggggaagacagacaataagtaaacacattaaaatctggcttggcttgatgttggggaggggtgagtgccatagagaaaacaaaccatttatgcagccaacaaacatatgaaaaaaatctcatcatcactggccattagagaaatgcaaatcaaaaccacaatgatataccatctcacgccagttagaatggtgatcattaaaaagtcaggaaacaacagatgctggagaggatgtggagaaataggaacacttttacactgttggtgggagtgtaaattagttcagccattgtggaagacagtgtgatgatccctcaaggatctagaaccagaaataccatttggcccagcaatcccattactggctatatacctaaaggattataaatcattctactagaaagacacatgcacacgtatgtttattgcagcattgttcacaatagcaaagacttggaaccaacccaaatgcccatcaatgatagactggataaagaaaatgtggcacatatacaccatggaatactatgcagacataaaaaaggatgaagtaatgtcctttgcagggacatgggtgaagctggaaaccatcattctcagcaaactaacacaggaacagaaaaccacacactgcatgttctcactggtaagtggaaattgaacaatgagaacacatggacacagggacgggaacattacacacctggggtctatcagggggttgggggctaagggagtgatagcattaggagaaataccaaatgtagatgacgggctgatgggtgcagcaaaccaccatggcacgtgtatacctatgtaacaaacttgcacattctgcacatgtatcccagaacttaaagtataattaaaaaaaaaagaaaagaaaacaaaccagtgtaagaggatggaaagtaataggctcgtttagaatggtgtgagaaagccaggcagggagaaggcgctgagacagggaggtcctggatgtgtttgtggaagagctgtggcagcacctggaacttggggagcaagggaaggagtgtgggcaggcaagggtgagggtgcagggggtcatgctgggccttccaggtcacggaaggacttgagctttactcttgttgtggtgagaagctgctgagggcttggagttaggggagtgaaaagatctctactataatagggagagttcgggatctgtaacttaaccccaggagccagcaaagctccctggaggaaatgcagtttaagctgagaatgggaggataaacaggtgtttttcagagaagaggaagggtgctctaggcacagagaacaacatgctggaatgcttctactagatcataggggcaaaatgggagtgcaggagtaggagagggctttctgggaaagatacttattttaattttgcatgcattgagtttttgaggtttctttggtttgttcatgtggaggtgcagagtgggtatttagcacataggtctgaagtccaggggaggggtgtgggacagcagttggatgtggcagagattccacaaagagcaaatatcatctgagaatggcagagggctgagggcagagccctgaggaacactggtgtttaggagcctgctggagaaagaaaatactgcaaagggaacggaagtggagtggttgccagacatagaagctagtgtctaactagatgtcatgagatgtggggaaggtgttacgtatctaagaatgcaaagttgaacccctgtgaactgtaatacttaagataagtcgtataaattgtctggaactagagcttgattttccaggagagatgaaatgtgtgtaggtgacaggaaacaatgaatatgtgggcgagtgtagtgtgagcaatttctcagaggtgaatttgacagcattttgcttaggaagctacaaagagaccaatgctagttggtgcaaggaattcaagaatttggacttaagtctatataatgatgattttttttttttaacttgagtttcccggtttatcactcccagaatataggcagaagtttgagatttttatgtgtattttctggaaaagatagtttcagtgttttttacattctcaaacaggtttatgatccaaagaaaaggcagtggtcacagatacatgaaacgacaaggtattcaaaggagaacgttgtactttatgacagttctttgggcagtggcttgcaggatgagtttgaggaatgattggaggcaggagagtaattctagtaattcaaatgtggagtattgttgatctctcagacacaaatggaaaaacaaggaattcaaagaaagataggcagagtgttttgaagaaataattgatgaaatttggtaatgagttagatgtaggagatatatttagcaaatatttattaaggactgtattaatctgttatcatgctgctaataaagacataccaagactgggtaaattataaagaaaaagagatttaatggactcacagtgccacgtggttggggaggcctcacaatcatggcataaagcaaaggaggaacaaagtcacgtcttacatggcaatagagtgtgtgcaagggaactgccatttataaaaccatcagatttcatgagaaatattcactatcatgagaacagcacagacaaaagcctgccaccatgatttaattacctcccactgagttcccccaggacacatggaattatggaagctacaattcaagataagatttaggtggggatacagccaaaccatatcaaggacctactgtatatggttaaaattgggagcaaatgagacatgattcttgccttcttggagtttactgtttactaggggaacatacacttgtcaataatcacccaaatataggattggaaattgtggtaagtgccatgaaaaacaagtatagggaattttgagtgtacatagctttggggacttgatttgatgagggagccttatgaagttattgcactagaactgaattaaaccacatttctaggaagtggacatctatttgttggttctttaaatttagctttacagaaatatttcctttaaaaaccaaggcttcttaaatttttaaaactgcttggctaatcaggggaataatgcttttggatagctggtatcgttatttatggttggaaaaacaacagtatttgattacattgagctttaaacttttcctttgattaatgaaaattttattggcccatagtttttattatgctctgtttttacttggtccaagagattctattctctggacccaatatgaataccttcagacatccctctttttttttttttttttcacccaggctggagtgcactggcacgatctaggctcactgcaacctctgcctcctgtgttcaagcaattctctgcctcagcctcccgagtagctgggattacaggcacctgccaccacacctggcttatttttgtatttttaccagagatggggtttcaccatctcggccaggctggtcttgaactcctgacctcatgattcacccaccttggtctcctaaagtgctgggattacaggcatgagccaccacacccagcccagacatccctcttaattatgttgaatatgtaatatcggtgatttcatttgaaaatatttagtagtcgaactagatcaaggcagttaagcttcctatttccatagatgcagtggtattgtgtcttttttatatgatctctcatgcttctggacatccttttttctgctattcttcattccttagctacacttggtgcttcgtggttgtaatgcattgtcatagatgcgttcatttctcattcgatcttcagctctatttctttccagagaatctctacaggcatctgttaggttgaaggacatctaatgtcttaatgtgtagcttggtaaaccagtcaactttctatctgagtcttaagagaaagtgtccaagatgagaaacggtacaggtttggtgacaactcagtgagaaaaagaagaattttacaaggaaggaggtatcttagtaattttgctaaagaagtaggtaaaccttcacttataataaagggatagggctcggttagggtttgtgaagtctccccttaggaaagcaaaccctgaaatattttgaatcttttaaagaaggaaaataagagtcttttaaataaatttttaaaatttattttatatattttttatagacaggctctcactctgtctcccaggctggaatgcagtggtgcaatcatagctcactgcagccttgaatgcctgggctcaagcggtccttctgtcccagcctcctgagtagctgggactgcaggcatgagccaatgtgcccagcaagagacattcattttggtactgtgatggtacagaaaaacaaagggcctttgaggccgaaggagcagaagaaggatggacttagacatggtataggcactttctactaaagagctgtgaagctaaaaatgccaggtctatgacaggtgcagtgggccaaggccaggtagagagcagcaggaagagaggaggtggggacctgtacctaggcccatctgctgggactgatctagccataggtactcagagaagcccagattggtgcctgacccacccttatggcccagacatggacacctcccagtctgttccttcctgctgcccatggatgggctgtgttagtctgtattctgaggacacagctctctgtctagaggaagttatgttatcttgatctgatggatactcaacgtgaacattatttcaacgtgccacagggtcttggagcccagaggaagaccgctcttgccttttagtttatattctttgtttttttttaaataacattttgacagtctttatggagtaagtctgggccaaaatgataattgacaatgttatttacatggatttctaagttggctaaaaaagttcctttatggttagtgaatatagcccatgtagtttccccgtcttctttagatgccttctatttctatgcccaaagtctgcagttgattttcagtaagctgggggtcatcttagagataaaatgtagatgaatggcattttgctgacagcatacatctttgctatttctgaggaaaatgggctctcgctattaaatcttttgtcaatatttataaaaatagtatttacatattctatctatattgtggaaactatacatttattgattcagtcatttgatatcaatgttgttgagtccctattccaagtgaggcactatgctctaagcacatggcattttaaagatgaataagacaccaagaactttgcagatagtaatggaaatgagaattaatcaattgaagattaatatagtaagtagcagaagagaaataaaaaaatcttctagagagttcagaacagggatgttgattcaagtttatggggattaggagtggctggtaagggaggcattcaggcaaaagacataaaaatgcagtattcccctcgcactcattaggatggctactatattagaaaaagaagagagtaagtgttggagaggatatagagcaaatagaaaccttgtgccttgttcatgagaatgtaaaatggtgcagccactgtggaaaacactggtgattcctcaaaaaatcaaaatagaattatcatatgatccagtaattctacttctgggtatatatctaaaagaattaaaaatctgggtcttgaagaaatatttgtatactcatagttatagcaacattattcataatagccaaaaagtagaagcaatccagatgtctatagatggatgaatgggtaaacaaagtctgtgtagtatatacagacaatggcatattagtcacatcatggaccttcaggacattatcctaagtgaaatatgctagacacaaaaagcaaaagtagggtttcacttaatgaggtatctagaattgccacattcacagagaacaaaagtagattggtggctgctaggggataggggaaggagaaaatggggaattattgttgaatgggtatggagtttcagttttgtgaaatgaaaatgttctgaagactggttgcacgatgatgtgagtatatctaacatgattgaattgatgaacacttaagcgtggttacgatggtaaattttgtgttatatatatcttaccacaatttaaaaaatatagcattttattatgtaggcgtgggtgggaagatacttgacacattggaacttctggccatgcgtatactgttcactcacttattccttcattcattcaacaaacatgtattgaatgcttgctatgtgctgggcactgagctagatataacaattaataaggcttataagacattgaatctatcaatttcatgcttgctaaatatctactcccacctccaaaggcactaagcttctacagttagatattcatagctgcttcctactgacttgaatcatgcataggatattagtaaacaagcaataaaaagatttgaggttgatgggggtgggttcaacagcatggtggtgaaatggaaagagatgggtaacagaatatgaactagaattgaaaactgtgagccagtgctctctaatgaacattaaaaaataaagaattcctatttgaggctgccaacctcagaactaagttatttagaatggacgaaattggcaaagtcagacgtactcaacccaaggagccaatattttgtgaatattatggcaaatgtagtttgagaaccactaccacaaaattgtgaaccataataatgactgagaaggcagggagaggttatacaatttgggctaaaaggaaagacagggcttgtgaaggggagcgccagtgaaagtcagtgtggttcgggtatttgggtggggactggaagcaggaagcttgagcttcctttgccaagagaccctgctggaagggctatcatcaattgactttagctcatcttaggattttcattttttaaaaaatgttcacaggaaccttcactccatctatactttcaatgtctgcctacctttctttcttatacaactttgaacactctctccattcatttaaatatattatggagtgccaactacatgccaggtactgtgctgggctcttattccacctttatttgattgcacatgcctgccaagtcctgggccaatataacatctactcctatgtctggtctggcgagagatgcaaactcatcttcctctactttccttacctccttccttccagtcttcttcaagttgtcttcattgaggcaatttcttttacctgtgtttttaatcccaactcctctagtttccttcttggctttattcttttatcttcctctttgtgctttcaaacattccctttctcctggcccatgcccttcagtctacacgaggccttctcaagtctcttcattctaaaaaattcattttcttgggtcttatattcttcagctgccaccctatctgtatcttttcctattctcctccaagttctcaaaggaatgccttccctcattttcatctccttacattccatctgctgaattttggcttgtgcctgtacctgtctaaggaaactccttgctaagagtctgctttgtcaggtctgaattcacttaaccagtctttgctttgttggacttctctgccccatttgccattcttgatcatcctctccataaacctttctacttaaagcattttacttccttattttcttggttttcctagaatctccttactgttcattttcagcttcctttctgtgttcctcttctcttcctacatttttttttagctttctactttcttaaagcattttacttccttattttcttggttttcctagaattttcttactgttcattttcagtttcctttctgtgttcctctgattgtctctctttctacattttttttttctgtgttcctctgattttcacgcagtctggagttgtcatgatcaatcatagcctactgcagcctcgacatcctaggctcaagtgattctcccacctcagccttacaagtagctaggactacagtcacacatcaccattctcagctaatttttttaagaagcatttttatagagatggagtcttgctatattgtgcaggctgggctcaaactacagggcttaaacaattctcctgctttggcctcccaaagtgctgggattccaggcatgaaccaccatgctcagtctctacatgttcctaaagaggagttttgaatattgaagaacagtattttcaaattacattattcaagttataaaaactgatatccagggttatgtggcaatgacgtaaaaatttgaattgttatttttttgacacatgttctgtgttgtccatcagttcatctgagttccaaatgtcccagctgttttatgctttgtctctgtttcccagagaccctgagtgtggtctagagttgggatgagcattggtctctaatggttctgaaataattgtatattcctgcaaaaacattaagtctattagaaaccagctaatttcattttgtcatttttataggtaacatattctggtgcaggtagtatgtttttaaaacaagtttgcaataaacaatttcccctcaaggttaatataataggcaacaccttttgctgcaacagacggcaagaggtaatgaaagattagcttacattatgattcattatttcaaaatgtcaggataaagtggatctgctgcatctcccagagagtgcatgttttgcttttctaatgttaatggatttactgtttttttccccccaggccaaattcagataatcgacgccagggtggcagagaaagattggccagtaccaatgacaagggaagtatggctatggaatctgccaaggagactcgctactgtgcagtgtgcaatgactatgcttcaggctaccattatggagtctggtcctgtgagggctgcaaggccttcttcaagagaagtattcaaggtaatagtgtgttgaaaacgacttctatttttgatcctatgagcagatcctaagagccaaagcgactgaggaaggaagacatagaatcagccatttgtacaaaacatgaatccctagtaggtccactagtatctttggtagaaacatggagaagagacaggatctcaggagaaggagttgacacatggcagggcagctgaggctgagtaattccgcttccttcctttggcaagactcaatcagtcttgagcaactctacagaagaattccactagctggatctctgaggaaaaaagaaatgttgtctgtgccctgactggggaatgccagatggacattcatgtttggtaggcaactttgcctatatgatctggtatatgctgttaattgtccatgcataattatctctctactcaggccttgtccaggcaaatattctgttttgttctagtttagcttgttctcccctttctctcttccatctctttcttgtctcaatggatgacaggatattttgctatgagctgactcagtggttggtgtcttgtaatggggagatatcatctttatcaaacagttattaagtatctacctgtagcatttcattttcccgcctgcctccattgttttcttgtctatagtttgccaattatagctaatatacggagagctatactttatttctactccagaaatgtctctattattgcattataataggataccctggggaaacactaatcatttttactacctaaaatacctatgctgaatatcctttatctgataggaacagagatctgacagcagcttaggctaaccaaattcattttttatcttaagtgtggggcatttttctctcttcttattctttaccttttcagcttaagtgaaggttagtataaacactaagaatatttctgatggagttttcatgtgattccttctacaaaaacccagatttaagtaacttgttgaaaaccagagtccgctaagttaataaacactgattgaagaagtgattctcatggactttctgtgatagctctttcctgccctgatatgagatgaaagctgggggatggtatatagtatttatttttccttccgttgccagtgggactttttttttttttttaaaagctgttcatatcttaatcgagtagcatgtgaggtcaacatggtctattttaaaagcattttcttcgacacattgcttttaacatcttttagaactctgctgtgagacacatggacttttttgttggtatttttatacaattaatgatattctcaatagtaatctttgtgtgtgtatatatatagaaataaattctaaatgtaagttaatatatttattatttttctaaacatatataaatatatatatgcacacaggctatttaattttattagatgatgctattttaattcagaaaaaaatgacatttatattttgatttaggttagtataagcccttagaggtgttttgacaactctcttaatttgtggttttactgtttatttgattttatataatctaaaataccattgtttttaccaagcatttaatttggcagtgaaagagcgtctgacagaggtatggttagtagataggtctaactgcacaactggatggattgagctgagactgtttcctcatcagtaaaaatgatttgaagcagtggttggcaaagtttttctgtaaagggccagataataatattttaggctttacaagggccatgcagtctctgttgcagctaccgaactggattatagcctgtaaggtgacctgtaaacacatggaagtgattatgtgctaataaaactttatttatcagaataggtaacagatcagccctggcccgtggccgatccctgatttaatgtttatttatctgatctaaatacctttatttatggaagggaataggggatttttaaatctaaagttttgattattcacattttactgagaacttactctatacctgattagatgttccgagagaaataaaaaaaaagtgtaagacataatccataataccacaaaatttaaaatgtatttaggaaatttatttgaggaagtaaatgtacttgttctcatgatacaatcagaaagtaagtcagtattgataaagtgttacctgtatgagaaagataaggaaaacaatagagagatgtaagaaatgaaaataccagttataaattaaaattattaagattgaaagtggaaatgatcttcctccgagaaacaatggcaatattctcacaaattttttacatcatttttgttcagcatttaagataaaattatataaattcccataacatttagtattgtctctaagcattaagaacagaaaaaacagaaggaaaatatatttctaaaaatcaacgaatacagtgtgagatgtttcattggtatggcattatctcaagttcaaacattttgaaaaatgtctgcttactctttgatagttaaaaacaagtatctcagctggcgtggtggctcaggcctgtaaccccagcagtttgggaggctgaggcgagtggatcacaaggtcaggagatcgagaccatcctggccaacatggtgaaaccccatctctactaaaaatatgaaaattagctgagcgtggtggtgcacacctgtagtcccagctacttgggaggctgaggcaggataattgcttgaacctgggaggcagaggttgcagtgagctgagatcatgccactgccgtccagcctggtgacagagtgagactccatctcaaaaaacaaacaaaacaacaccaccaccactaacaaaaacctcttatcgccgtcttgtatacgcagaccagctagtagaattttactgaaacagtagcctataaaaatgcaattccacttggtttcagaaacttcttgtgtatcatagtgtgaagtcacttatcttaggcttttaaaatgggataaatattgagtccaaagttctggaagaagcctagaaagaaggcagagttattaacttttagatatagggaggaaccttaaaattattcagttcttcattcattcacttattcattgactagctttactaacaaagccctatgcaagaccctggaaatgcaatgatagaaaaacctggtccctaccctcacagaacttgtgaggtaaagggggatacagactgataaaccagcaattagatgatggtgtcaagatagaggtgaaggcagtgtcttataggatccaaactccactcagtcctggtggtggttgagtctggctatcagaggtttcctgattaaatctggagggtgagtcaagggagcatggtgaagaaggagggaatgcatgtttagccatgtgaatgagtccatgagtgaagaccaggaggaaaggcagagcgcggggaattctatgcgtaatatttaacaaaattaatgtactgttaaacaaagacatttctgggccatggatttaatcctagactgtgtaaaaaccaagtaattgatttcctttatactttaaaagcatttccatgtatttgatttgtttgtgtgtataaaagggaaataccacaacaagtttaagggtttctagttctgctttctcatcatagtcttgataacttggaactaaaaagtttttgctgaaattgtctgtgactctttataaatcacactgcccctcaaacacatttaaggatggtgaagggtctgacacgtaggtgggaagttctgaagatgccgcagctctccctgttttccttgttacttaagaagagagctagaaatgagtgtacatcagattattctcatgttctaagtgttttggttgaagaggtaaagtgtttggcttgaaagcatacaaattttcatccactacttagtgtacaaacttgattacttaagagattgagtaatggcctccagtgaaacgcattctttttaaaaagcaaagtgaaggatgctatttaagtcagaaggggcaaaattggatattttatgagtttattaatcattgcaggcatagaagtagtgttccttaagatgtgttttagacagagtccctgggatgagttatataagcagatctggttgtagcttcagcagccagatactacctttgagtattacttcaaggaaaaaggactccactgagctcactgcttctctttcattattatttcagaaggttgtgtggcgtagagggggctcaggcctacctatacaccactagctatgttgccattttatattatttctataaggtgccaacagaagctgctcatcagatcagacagacatagcccaggcaagtattgatttacagatgatctttggccaggaagacatggtatcagggtagagtctggttatgggtcaatgcagtggggaccttaggtcctacaggtataactgagagcctgatccaccaggccttagaaagcttcagggtgagacagtccagcaccctggatagctcctttaacagctgtggccggtaagcaggcacttatttgctaaagaactcaagcccatttagctggcttcatctgctttgtagagctctgttaaaaagagttcctatttctccacatcctctccagcacctgttgtttcctgactttttaatgattgccattctaactggtgtgagatgatatctcatagtggttttgatttgcatttctctgatggccagtgatgatgagcatttcttcatgtgttttttggctgcataaatgtcttcttttgagaagtgtctgttcatgtccttcgcccactttttgatggggttgtttgtttttttcttgtaaatttgtttgagttcattgtagattctggatattagccctttgtcagatgagtaggttgcgaaaattttctcccatgttgtaggttgcctgttcactctgatggtagtttcttttgctgtgcagaagctctttagtttaattagatcccatttgtcaattttggcttttgttgccattgcttttggtgttttggacatgaagtccttgcccacgcctatgtcctgaatggtaattcctaggttttcttctagggtttttatggttttagttggtgggactgtaaactagttcaaccattgtggaagtcagtgtggcgattcctcagggatctagaactagaaataccatttgacccagctatcccattactgggtatatacccaaaggactataaatcatgctgctataaagacacatgcacatgtatgtttattgcggcactattcacaatagcaaagacttggaaccaacccaaatgtccaacaatgatagactggattaagaaaatgtggcacatatacaccatggaatactatgcagccataaaaaatgatgagttcatgtcctttgtagggacatggatgaaattggaaaccatcattctcagtaaactatcgcaagaacaaaaaaccaaacaccgcatattctcactcataggtgggaattgaacaatgagatcacttggacacaggaaggggaatatcacactctggggactgtggtggggtcgggggaggggggagggatagcattgggagatatacctaatgctagatgacgagttagtgggtgcagcgcaccagcatggcacatgtatacatatgtaactaacctgcacaatgtgcacatgtacactaaaacttagagtataataaaaaaaaaaaatttaaaaaaaaaaagagatcttagttcttttgggcttggggactcactcttgttcacttaaagtggattggttcttacatttattttcatagttgtgtctggtcaccttctggcttgatgtatgcccctatgtctggaaaaggttagagaatggggtagaagtggaggctgcccgcccatcatgtaactgttttatcttttcagagatacaattgggatcctaactctttggtctccgtatttccacacttgctcttatacgattcagtttccatgcaacagcaggagagatattttagatatattaatcaggtcctatggtcttgagtttacagctctcagtgtaaatcttactctcaagagaaaaattttccttctgcagctgaaaacattcgacatattctctctcctattccttctcccccattcactgtactccaggcacaccagcttttatttttatttattttttgctattccccccaacacgccaacatgttccttcctcaggatctcagcacatgtggttccctttttccctttgcttgaaatacccagatctttacttggctggtttcttgtcattcagattctgcccaaagtcactttctcagaagtagtgttacccttccacgagtaatactactcttacttctctttacagctctcaaattcttatgaagttttcctatttattcatttgtttgattattgtctgtctgcatcaggtaccgtgcaaacttggatgtaaactcagtgatagctgatttctgttcagcattgtttgttgctatagctccagtgcttttagtcatgttgggcacgtccctactaaatagtagaatatggcgaagggtcagagtcatgatagatagccggatgtggtggctcatgcctataatcccagcactttggtaggctgagatgggcagatcacgaggtcaggagttcaagaccagcctgaccaacatggtgaaaccctgtctctactaaaaatacaaaaattagccagttgtgatggcatgtgcctgtaatcccagctactcaggagactgaggcaggataattgcttgaactcgggaggtggaggttgcagtgagctgagatcgcgacactgcactccagcctgggcgacagagtgagacttcatctcaaaaaaaaaaaaataataatgatagataaaaactgctagaggctctctgagaaggaagaaatgtcactgggttaggttggtaagagaagtgttaatgcaagtggtacatttgatataagcatgcaaataaatggtagtttggaggaaaattccagaaatgtgaaacagtattgagaaattgagtaagccagctttgagagaacacacggcttattgtcctctccttctgttttgctcctcagctctctaaagtgggcattctctagggtcctgtcttcaatctcagcttctttttcttcttcatccttctctttccacctagtttcctagggaattatatatatatatatatatatatatataattttgtatatatatacaaaattatatatatatataattttatatatatataattttatatatatataaaaaattatatatatataattttatatatatatacaaaattatatatatatgtctggtacaggctgaattgtgtctcccagaaagatatgttgaagtcctaatgctcagtgcctcagaatgtgaccttatttggaaataatgtcattccaggtgtaattagttaaggtgaagttatactgtggtgtaacccacagtatacttccagtatatacttcagtatatgggcccttaatctaatgtgactgatatctttagaataagaagaaaatttggacacaaacacagagaagagaatgtcatatgataacagagagagagagagagaagagagagagggaggagagagagggaggagagagagggaggagagagagagagagaaggagaaagaaagagaggagacagaagagaaacatctacaaagcaaggaacaccaaagattgctggtgcctaggaaactaatataataacataatatttggggcctaaagtgttacagctgcaccaatatctcccaaatcttgctcctagctcctgccccagcctgattttctcagtgactcccctgtgtttccctctgccaccagcccctccttctgcctgctgtgtgtgacagttcccttgccactccctccggcatccgtacttcaaactggggagttagttatttccattgtttcttattgcagcctctggctctgacgtttccagagctgttgcatagctctattgagtctatctccttaaatgcattttcatccacttaccattgctgagttagctgcattacctttcaccaggatgcttgcaataatttattgtttccatttgccttctccttcatctaagccgtttgcttatgtcttttttcttgttgcgagacattctgcacattgccactctattagtggtcataaagcaaatcactgatcatgtcaatacgcagtacaagatcctttaatgacctccatagcccatggaatggtccttaaacaagagttcaaggactgccacaatcttgttctagcctatctttctagtcattttaaagtcaccatttttacttgtgaaataggcactccagacacagtgaattccttgttcttctacaaatatgatgattccatttctttgctgggaatttctttccagatttacctgtaaaaattcttcgaaccctaatcaaaagtgactgttgttaagcccctgaagataatgcagaaattctctctctcctgggacctcgatattagtttattccattgtattgcatatatttgattgcccatgttctgtcccatactgactgtaaagtccttaaaggtgagggcccaatattctcagagtcactcaataaataaataaaagaataaatggaaattaggatcagtttgtgggctttagcaacacaaaaacattatactttttcaacatgggagaggtatgatgaaggagtttttttttttttttgagacagagtctcactctgtcactgaggctgcagtgcagtggcattgtgtcagctcacaacaacctccgtctcctgggttcaagcaattctcctgcctcagcctcccgagtagctaggattacaggcgtccaccaccatgcctggctagtttttatatttttagtagagacggggtttcaccatgttggccaggctggtcttgaactcctgacctcaggtgatctacccgccttggcctcccaaagtgctgggattacaggcgtgagccgccgcacccggctgatgaaagagtctttaatgcagattaatctggcagaggtatataggagggaccagagaagggaaagaatcaaagcgtgaagaccaatttggctgatattcaactagcttagatgtactaaaaatctgtactttttggtatttgtgaaatggaaagaaggggaatagaataaaggatattataatgaaaggatatacattgcttgaaggtaattaaatatgggttatccaggagataaaagagttaaagaggttcagacatagactgaatgaactgagaaatgaatgacttggtcaccaagaggaaggccagtcatcagggggtaggataagttcaattctagacatgctgcatttgagatgatagctggatgtccagatggaattatccagcagccacagaaacagaatcagctctctgcggatattccaggggtggggatttgaattaatttcctcaattaattttaaagaaacttgatgaaaagaatggtctgaatacttcttgaaggttgcacattattaataatggagaaataactctaaaaccttcctcttgattttcataataatataagcattccctgaatcttaccaaaccttgtaagaaacactcttattataaaaagtgtatgtgcaaagcccttctaaacaggaaaatgataaattagtcctacagggccaaatgcagctctctgggagcttacaattcagaaagaacatcctgctaccagcacattaagctgtacaaatagtaaactgcagaaacaaatataagcatttttatgatgtccaaacaagaaccaagcaggtgtttttttttttttttttgcagattatttatactgtggcagttcatagcctccttttcggacccagagcttgcataatccttcccttatttctacttacgtgttttactctccatcatgtgttaacatacatactgtgcaacagaaatgactatggaggctgagggcagcagagttttagtgtgtacacatatgagctgtcatgtaattttcaagtgaaagcctttgcaatgaaactttttaaaagaaagtcatggccgggtgcggtggctcatgcctataatccagcactttgggaggctgaggcaggcagatcatgaggtcaagagattgagaccatcctggccaacatgatgaaaccccgtctctactaaaaatacaaaaattagctaggcatggtggtgtgcacctgtagtcccagctactcaggaggtggaggcaggagaatggcttgaactcgagaggtggaggttgtagtgagccgagattgcaccactgcactccagcctggcgacagagtgagactcgtctcaaaaaaaaaaaaaaaaaaaaaaaaaaaaagagaaagaaagaaagaaggaaaaagaaagaaagagaaagaaaggcgggcattaacttcaggtattggtaaatttgctaggtgtttggctactgtttctcatcagagaaatagaaagacacaccatgaaagtcaaggcctgaaaacctcattccatgtaagaatgacatccccagtgttaagtgcttgttagtggttaatgcgatcctgtgaaacttagatgtgtttgtgcacacatgcacgcatatatttgaagaactcagaagagttaaatcacagcctttcaacctgtgaaatgacagtagttcttcttttttcctctccctttggctaagtcatctttatcttggagataattaagacaaaaatgcctctgacaaataaaatcagtatagaacccctatttcttggcagcttttgtggacacagctgaagctttcagaggtcttgaaaaaccatggcaacaaatgcctttgaagggtaagcaaaggttccaaatgtttttaatcgctggtgttttttctgctaccacttcaagcatttttcttcattttttgttcatctgatcaaaattaaatttccaatttccctactaagtggttctgtcctggtcatgccattgactatttccattaaagtagtagagtttgtgcccacatatggttgttaagctcatcaacaattccattagaaagctttgtttatcagtggcaataatttcccataaaaattatagataggttttaatgggcacattttcaaaaggcatcaactcgtcctcaaaattatgtgctgacactgttcttacaaccatggttcgtggcctaattccaccaaatttctctctttttcatagagaactgttgtcagtagctttatatccttttaaagagaatggtctgtatctctgatactcattcagagaaatgagtattttagacgtaggttgctaattttaagctatatactacactatgtcagcactatataggttatcttgtaacctgcttgcctggctatttggctgaaaaataacaacatgtaaggaaaatctatttcataagtctaacatttactttgtaaaacttgttctggctactctgttaattttccacttacgtgtgggttagagagcagatttgatttttttttaagcgaaagatatggcttacctgagaaaagaacatagtggggaaagcactcctattattttcctcatatttccattttcctttagcggaaataaaaagacatttcagtttttcagttgctaagaaatgaaggaaccaaagacaaaacaacttaattattaaattacaatttatttctgtaataagcactcgttctctctgttttcctggggaaagagtatgtggactttcaattttatccaaataagcatcatctttctctgattagtgtggcagtttcaaaatcatgtattaggaagtacagagtgaatgagtagagaatttctaaattagcacccaaggttgggtggctagattatgtttataaatatgaacttttgtattaagtgcaatgatttaaaagaatgcctgcatcactttagggcatttcattaagtgctgtgcacaatatttttccttatacatcataaaagataaattatagttcataaaatagtataaattcctaattattttgtgcttttgacacctcagagttactaataagggatttcgttttaaaatgatatttatttatttatttagagacgcagtctttctctgttgcccaggttggagtgcagtggtgcgatcttggctcattgcaacctctgcctcccaggttcaagcgattctcctgcctcagcctccagagtagctgggaccacaggcatgggccaccacacccaactaatttttgtatttttggtggagacggggtttcactgtgttgggcacactagtctctaactcctgacctcaagtggtcctcctgccttggcctcccaaagtgctgggattacaggcgtgagccactgtgcctggctcgttttaaaataatttaaaagtatattttgccaccactattaaccagttaagccatgatggtatattataatcaccatggagatggtttttctctttattttattttgtttgttttctgattgctagcatgctgattactcttcctattctacaagtgcctgcaggccagccccatttttgctctcttcacttcatttttcatttctccctgtttcactcttcatagcacatttgtactctgtccacacctagagacctccctgttgaagttcttcacattctcttccctagagagggttaacttgttgagctcagagacttaaacttaaaataaaatgtaacagatatgtattgaatgactattttattttagctctaggagaaatgcaaagatatatcatccatagaccctgaaatccagctaagggttctgcttatacacaaggtgaaaggttgtgataatgcacattaaacaatagaagagttaaattcagcactataagtgatgcctcaaagcagcataatgggaaaaaggggtatttcagaaaaaaatggtatgagttcagaggcaagagaaaacagaatgctctagattaaactcaaagactttatggaggaggtggtgtttcaatagatacctttccacagaaccatgaagagagttctacttaattgtaagtggcctgtgatttgtcgttagtcattgcatgctcaattctgcatgtgtgataactgtgtatttttatggcaaaatcgcaattacttttgcaccaacctaatagaatagtgtgggtttaaaaaaactatttgtaatatattcgaacatatttcttatatatatgtttcaccatcattagcagtaaatctattttgcatccagagattgaataatattttgtttctaggatgtgagtgatgtactattttaacttacttttgaagtttgacatgggagtgatattaataaaatctaaagatgctcctaaagaggagcaatagataatgtaggtatagataatgtagctattatggaggtaagtgtatttgatactttttattatgatatgaagggaaacaactagtcccaagctacaatttattaaggtaggcttagcttatacgccataatttttatgtttgcaactttcttgattttcttcctctggctttacttctatgggatatttatgaaaggatgtttttaaaaatggctagagacttttgcttctaagagttgacataaacttttccacaacatgaacaattagtagatgatacacttagatacactcttgaatttttaaaattgtggcagtaaaactgatctcagagaaggaagaaaatgctttggccagcttttatcaattatatacaacgtgtttggaagattcagttcctctcgccttctttctccctatataatactttttcttaaggttggtactattgatgcacttggtgtaaacacatgagataatagcaaaatatgaatctaggtcccagaaatgggcttctttcactctgccacctgttctgactgcatttctcctgactttctgtaaatcccggggaggagctggaagagcaaggtgtgtgctagcataactttggggatgaagtacccttctttttttctgattttgttcccacatctccttactggaccaagtaagggcatcagtgtcaaacttcctgattgaagatacatttttgccctaccatgaagggctctgggtaacatttattgcttataaaatgcttttttggtggctactttgtttctgaatataaggcaagataaaaagtttgattcaagagtttcttgtaaacactttgtgtgtgcgtgtgtattcatatatggctgcacacgtacataagtccatacataagtacagtccaccctccatgtttgtgggttcaacatccatggattcaaccgactgcaaatcaaaactatttggaaaaaaatggatggtagtgtctgtgctgaacacatacagagattttccttgtcattattccctaagcaatataacaactgtttacagagaatgtacattgtattaggtattataaataatctagagatgttttaagctatatgggatgatgtgcgtaggttatatgcaaatattatgtcattttatataagggacttaaacatctatagattttggtgtctgaggagtcttcgaacaaatcccccacagatcctgaggggccactgtatatatatatcttcataaacacacccacacacacaaacacacccacccacccacacacacacacacaccaatgtgtatatacttttttttcttttttttaattcgagaccaagtctcgctctgtcgcccaagctggagtgcagtggcgcaaacttgcctcattgcaacctctgcctcccgggttcaagtgattctcctgcttcagcctccctagtagctgggattacaggcgcctgccaccatgcctggctaatttttgtagttttagtagaggcagggtttcaccatgttggccatgctagtctcgaactcctgacctcaagtgatttgcctgcctcggtctcccaaagtgctgggattacagatgtgagctaccacacccagttgcaatgggtatagacttttgaaatgtgtactacaaaatattaacagtgactatctctgaatgataggattatggataaattttgttctttttgcatatctgtatttttatttttccacagtaaacatcttttacttctgtaataaaaacttcattaaaaaatccatgctgcaattgattaattatatactaacttttttttactcttccctcagtacagaaagattattctgtatttaccaaatctttacactttatttgcaaatcattttgactgtctgtttgcaagaggtcaaatttgcactcaagttcagctttcgttcattatccatgagcccaagagaaattgtgtcaggtggacatcaggtagctgaggccaatacaatattattcctttgggttgttgagaaatcatagcagaggaaagcctgtgttgataatagagtaccaccaggaatctaggtctttacagctgctggcctgaccagcaagggtaaaatatttcagtcacgcagccagtgattattaaccctagctctatattccagagaggaagagctagcctttttgggttgtgatctgtcactgattgcagttgcacatatactagccatgaggtctacacacatgtgaagagcatgctacacacatagactagatacactgactcatcagcctggaaacagtgcctgaccctcactttgattgtttgaatgtgtcctgacccattaccctgcctttggatccgttcctgtttttttttttttttttaaagcattttatctgtgaattaaaatagtactttccattgcttcatttttttttccctgaggagtttagctttgtttaattagaaacaagacaacaatcattactggtctggtgcaatcttgtttaggactcctcttttgcttagaactatacctggattagggatcactgtgatttagagtgtgcagtatgaggttatttaaatacttaatagtatatttgaaatgaaaagagtagaaattaaagactgaatcatttaccaagaaataacagaggagaccaatttacttctgtaagatttagtagaggctgttcccttctttataattggctttgtttcagttaccagttaagtggggtgaactgttattaaaaggctatgggtaaggttacagtagcattcttctaagaaaaactacaggagtagtcactgtgcagctatctgctttgtacctgccaatatggcagtagatatggaagggtcagaaaaacaggacttcatgttcaataacttttcctttttcctttctttcccttatttttttcatgtcttgtatgcaagatagcatgcctattctttaccttcaatgtatttttgaatttttaatccagatcatattttatcacaatttgtaacatgtagctaataaaaatggttattacatgagaacttgctttacaaattatagatcaaatttttatacaaattattatgtcaccatagaaaaatagttacgatttatctgtttagtcttagaaaaattatttcacatattagttaaggcttttagttttgagtgagcaaaatccaattcaaactagctttgggtagaggtgggggtaaaagagaggaatggatttcaatggaaggtttacttgcgtgtcttggctaactgcaaacatggcagggtgcaaccagaccttagtgatcacagacccagggactcagaccctgtgaggaccttagccttaccgccactcttctccatgtgtcagcttcgcgttctctgtctgcaagtatgcattttccctaaggtgggaagcagagttggcaacagctgccagggttgacttcctgtggcattcttgcagttagcaaatattagagaaggactctgcttggcccagctttgggacacacctctggaccaactagctgttctcaggaggcagtaacatgtacagaggtgatccctggggctcgccctgtgaaatcattgtgagccaatcactacctccctccctgatgctgatgtctactatgtttgatgtctctgaacttccatttcctcaattgtgaatggcaccctggttcctaccttgctggatagatgtagtgattagagttcatgcttaacctacaggtgctctgtaaagaatcattggcatcattacctcttgttggctctatcccattccctatagatatctttctgctctgagactaagcagagaaaataatttaacatttaattattgtgcttctaaatccacttttacctcttctttctttacttttctctttattatttttaattatttcaaaaataaaattgtatatatttaaggtgtacaagatgttttgatatacatatacataatgaaatgattactgcagtcaagctaattaacatcaatctcctcacctagttatcatttttggggggcatggagtgagagcacctgaaatctctcttagcaaatttccagtgtataatacagtattgttaaacatagtcatcatgttgtacattagatttctagacttgttcatgctacataactgcaactttgtaccctttgaccaatacctctctattttctccactattccatgcctgaaattgtgggatataggtatatagtgtgtgtgatatatatagagggagtgatatatgtatatataattgtgtgatatatatgtgtgtatatacaaacacacagacatacacacatgtacatatgtatatacatgcacacatacacaatgggatattattcagctttcaaaaaggacatcctgccatttgcaacaacatggatgaacctggatgacattatgttaagtgaaacaagctggacacaaaaagaaacatgcaccttacttcttagacacaaatttctttctcatagccagcacctgaaaatagggccaagtattttgcatgatttacaattgactgtataaatgtagcatagccagttatatgatgtgttaccatttctgctataaaatcaaaagaagagatcagaacatttaaaaacttccctgtggatttctacctcttacctaagctttgttcttgtttttttaaacctcatgaacacgaagctttagatagcggaggtcatgtatccttgggctcaaatatacagtttcttagcaatctttgattgctacattgcccttttttgtgtttttaactggccttccctgacttaaaatatactttaaaaaataacaaaggtggtatttagtttgcacagtatggaattaaaggtaaacaactttaaattaaatttggttggatgtataaattattaaaatatcctttctctcatggctgggtaagtctgcattttccattcagcctgctatgtctctttccatgagaacactcccgaagaatggggccctgcttccaaacaagccaagcattttgtagtaaattttaaaaagctaaatttcataataacctttataattgctacctgaaaatggagtttggaatggcaccaaattattaatcagtagaaggagaatagattgcaaaaaggtaattatatcaaattgaatgcttcttgaaatatattctgttaaataaaatacagttcctcttccctgttctcatttgtaagcaatgaggacaattcaggtagcatgaatcaggaatcagagtacttttctgttccgcagattggcttaatcattttgggctcacttcaaactgtagatgagcattgtcctttaacctgccgggcagcagaggtgaccacgttcactgcaaagcccagaagtgagttgttcatctgggttagggtctcaggaagaggcatgttatgacttccccacattcctggacagtttagactgtaattcttggttgtttaaaaaggtgtttgaatgtattttgttcagaggcttgagtaaatggctcttattcttacacttttttttttgcctgctttttccagcattagaatagtttcagccctgacaattagccttatgctgactggagtggattttttgcgtaggaccaagtgttttgcatgatttacaatggactgcataaatgtagcctaacaagttatatgatgtgaagaaaattacttaagggtaaaaatggattgtttactgagaaaatgatgttattataaactggtttgagggtattgtggtttagatgctgtccttacaaatttgagctctgttggtttggagatttaatatctaataataatagttaatgtgtaatgaatacttgccctgctccaggctctatgttacgtgtcctgaatgcatcatctcatttaatcctccataaaatttgaagcagtcagcattgtaattaatctcacttttcagatgaggaaaccaaggtatgtaagaaacaaaaccagtgttgaatctgactagtacgactgcaaagcctgactcttaaccattgtgttctgttgccttctccaagggaaaggagtgcttccagaaaggccattggaagtgaggagtgtcacctgataatagctggctcctcatcccactaggttaacaggcaacagatgggggccacagagttggctggagttagtcctggttgccaagggtaaatggggctgttaccatgcaatggatagaaactaggatgctcctgtgtgtctccttatatcctaccaggtgtagcatgaaggttaaggacaattccgtcctcttatttggagaggagaccaaggccctgtaggactaaaggtttgggtgagctgaaagccaagggcaattggcccagcttggggaggagagttacaaatacatttgtgactatcagaccagaaacagactgcggtgttcacctgcggtttgggtacctgctgcttgttctttgctggggtatctgaagactgaaaacacagctcacacttagcctttttcctattctgtgtgaaagaactgtagtagttttctcttgcttaacaaggttctagtggtgaagtttattgcttagtctgtgagttgtagggaaataaccacaggatgggatggtagcagaacgagaaaagaaaagaagattgtagatgccaggctggtgtcggcttgaaatttttaaagtatacagttcttctttatggattattaaaaaaaaacagcaaatgaatacacaagattaaatgttaagcagtacaacattgtacatgatgaaaggttaaagtctttctctggtctcattcaaaaatctacagtctcttgtagtatagtttgaagtcaggtagcgtggtgcctccagctttgttcttttggcttaggattgacttggcaatgcgggctcttttttggttccatatgaactttaaaattctgtgatgaaagtcattggtagcttgatggggatggcattgaatctataaattaccttgggcagtatggccattttcacgatattgattcttcctatccatgagcgtggaatgttcttccatttgtctgtgtcctcttttatttcattgagcagtggttttgtggttctccttgaagaggtccttcacatcccttgtaaggtggattcctaggtattttattctcattgaagcaattgtgaatgggacttcactcatgatttggctctctgtttgtctgttattggtgtatagaatgcttatgatttttgcacattgattttgtatcctgagactttgctgaagttgcttatcagcttaaggagattttgggctgagacgatggagttttctagatatacaatcatgtcatctgcaaacagggacaatttgacttcctcttttgctaattgaatactctttatttctttctcctgcctaattgccctgtccagaacttccaacactatgttgaataggatggtactggtaccaaaacagagatatagaccaatggaacagaacagagccctcagaaataataccacacatctacaaccatctgatctttgacaaacgtgacaaaaacaagaaatggggaaaggattccctatttaataaatagtgctgggaaaactggctagccatatgtagaaagctgaaactggatcacttccttacaccttatacaaaaattaattcaagatggattaaagacttaaatgttagaactaaaaccataaaaaccctagaagaaaacctaggcaataccattcaggacataggcatgggcaaggacttcatgtctaaaacaccaaaagcaatggcaacaaaagccaaaattgacaaatgggatctaattaaactaaagagcttctgttctttgctggggtatctgaagactgaaaacacagcaaaagaaactaccatcagactgaacaggcaacctacagaatgggagaaaatttttgcaatctactcatctgacaaagggctaatatccagaatctacaaagaactcaaacaaatttacaagaaaaaaggaaccccatcaacaagtgggtgaaggatatgaacagacacttctcaaaagaagacatttatgcagccaacagacacatgaaaaaatgctcatcatcattggccatcagagaaatgcaaatcaaaaccacaatgagataccatctcacaccagttagaatggtgatcattagaaagtcaggaaacgacaggtgctggagaggatgtggagaaataggaacacttttacactgttggtgggactgtaaactggttcaaccattgtggaagacagtgtggcgattcctcagggatctacaactagaaataccatttgacccagccatcccattactgggtatatacccaaaggattataaatcatgctgctataaagacacatgcacacgtatgtttattgcggcactattcacaatagcaaagacttggaaccaacctaaatatccaacaacaataggctagattaagaaaatgtggcacatatacaccatggaatactatgcagccataaaaaaggatgagttcatatactttgtagggacatggatgaagctggaaaccatcattctcagcaaactattgcaaggacaaaaaaccaaacactgcatgttctcactcataggtgggaattgaacaataagaacacttggacacagggtggggaacattacacactggggcctgttgtggggtggggggaggggggagggatagcattaggagatataactaatgtaaatgatgagttaatgggtgcagcacaccaacatggcacatgtatacatatgtaacaaacctgcacattgtgcacatgtaccctagaacttaaagtataataaaaaatatttaaaaaatctacagtccctttctcaataggtaaacactattaacaatttcttctgaaaattacatatgtacacacacacacaccccacacatagatattttgttaacatacattaccttatgctctacacattattctgtgcctagcttttctcatcgaataatgtgtattggagatctttccatataagtacatattggtctcactcattcatttttaatggctgtatattagtccatagtatggagtaataataccttttattggcacaaagttttgcagttgacaaagggtttgcatatattgtttcattgggttgtatagcagtcatcaacggacatatcaagaatcccagaagggtaacctgggcttcacccaggatcgcatggagcttgggactcaaacagctaacattccctaaacaggcccatattcctgcaatttagtgcagctgctacaacatttaggtaaactctttgaaagcagtaaaaagatcaccaatctgggacatcaagaagccagacgacaaggagacatagacctcaggtgagtgagaaaagagaataattgaagtttagaactgaatgggcactaacgaacaacagatacatctctttcctttcaccgatgaggacctgggtgtggcctgtggatgttaagtagcatgtttaggccacacagctggattgttttctttcctgaggctagctctggagaggggaggaaacggagatgctagatttttccgggctctcttttctcatcagctagaatgggatgtggatggaatgcagcttgagaagccaaacacccttgagaaatgagaactctgctttctgatgtggggcgcatcctatctgagataactctcctgccagcgcagtatgaccattgcgacttgagctgtgtgggtgcccaggtggtgtagaccttaaaaccactcctgcttttgtttactgaatgtctaatattcacacagttctttgtctgagtgcagggccaaagcagcaaataacgaagaagctgtgcccaaccataagaactatgaaatgctccagatcatctacgctagtttgagttaaatttaccatgcaaataaatatagaacatttcttcttatgcatagattgtatttgttctattaaacaaccatcctgtaaaggttttattcattcatttatttttatttgttaggagaaattgttatttaagctaagaaagtagactagtagttatttctttttttttgcttattatactttacgtttggggatacatgtgcaggttagttacgtaggtatacacgtgccatggtggtttgctgcacccatcaacctgtcatctaaattaggtatttcttctaatgctatcccttccctagccccccaccccctgacaggccccagtgtgtgatgttcccctccctgtgtccatgtattctcattgttcagctcccacttatgagcgagaacatgcagtgtttggttttctgttcctgtgttagtttgctgagaatgatggtttccagcttcatccatgtccctataaaggacatgattgcatccttttttatggctgcatagtattccatggtgtatatgtgccacattttctttatccagtctatcattgatgggcatttgggttggtttcaagtctttgctattgtgaatagtgctgcagtaaacatacgtgtgcgtgtgtttttagaatagaatgatttataatcctttgggtatatacccagtaatgggatggctgggtcaaatactagaaggctacagtaaccaaaacagcatggtactggtaccaaaacagatatctagaccactggaacagatcagaggcctcagaaataatgctacacatgtacaaccctctgatctttgataaacctgacaaaacaagcaatggggaaaggattccctatttaataaatggtgttgggaaaactgactagccatatgcagaaaactgaaactggaccccttccttacaccttataagaaaattaactcaagatggattaaagacttaaatgtaagacctaaaaccataaaaaccctagaagaaaacctaggcaatacaattcaggacataggcatgggcaaagagttcatgactaaaataccaaaagcaatggcaacaaaagctataattgacaaatgggatctaattaaactaaagaacaactgcacagcaaaagaaactatcatcagagtgaacaggcaacctacagaatgggagaaaatttttgcaatctatccatctaacaaagggctaatatccagaatgtagaaggaacttcaacaaatttacacacacacacacacacacacacacacaaacaaccccatcaaaaagtgggtgaaggatatgaacagacagttctcaaaagaagacatttacactgccaacaacataaatatgctgccaacaagcatatgaaaaaaagctcatcatcactggtcaagagaaatgcaaatcaaaaccacaatgacatactatctcacaccagttagaatggcaatcattaagaagtcaggaaacaacagatgctagagaggatgtggggaaataggaacgtttttacactgttggtgggagtgtaaattagttcaaccattgtggaagacagtgtggcgattcctcaaggacctacaattagtagttatttctaggtctgacgggctgtcttttagtttgttttcttattctgaggtggacttaaaccaattttaaaaacagggatgactgaattcgtgtgttaatcttgtactacaggaaccctttgacattgattcagaagcacccaagtgtttgttcattaatccttttttatttttgcatattatttatttttcaacttttattttaaaaatcaggggtacatatgcaggtttgttacaaaggtatattgagtgatgctgaggtctggcatatggatgaatctgtcactcaggtaatgagcatagtacccaatgatagttttttgtacccaatgatagttttttgttttctttgtttttttttgtttgtttgttttttgagatggagtctcgctctgtcacccaggctagagtgcaatggcttgatctcggctcaatgcaacctccgcctcccagattccagcaattctcctgcctcagcctcccaagtagctgggactacaggcgtacaccaccatgcccggctaatttttgtatttttagtagagatggggttttaccatattggccaggctggttttgaactcctgacctcaggtgatctgcccacctcggcctcccaaagtggtgggattacaggcgtcagccactgtgcctggccccaatagatagtttttcagtccttgcccctgttcctccttcccacttctagttatcaccagtgtctattgtttctgtctttatgttcatgtgtaccaaatatttagctcccacttataagtgagaacacatggtatttggttttctgtttctatgttagtttgcttagatagacctccagctgcatccacgttgctgcaaatgacacgatttcattcttttttatggctgtgtagtattccgtggtgtagatataccatatattctttatctaggataactgatgggcaattgggttgattccatgtctttgctattttgagtagtgttctgatgaccatatgggtgcatgtgtcttttcaatagaacaatttattttcattactcttatcaggatacctgggaggaacttctcctacgaagttaatttggggggactcctgaagatgagtgaaaccccttattaagcacttagagggtcgaaagtgtacaagggaacgttcaggtgtgacagcttgagagacatgcatattccacccccacaccagagcttagtgaaccgtcttttctattttctcccaaagcaccaaaatggcccagaaattggaagatggaaaatggacttatttatgagtctgggaaggcagggcagtaagcacagtcctgttcagggttctgagttttaccctcttgctctgattgcgagatcattttcctcttccttgcttcttcagcttaggacaagaacagtttggaaattgtttctactactttggacaccatagtttagatttcaaatgagtacaagtgggaggaaagcttggataattctctggaaataatcgaacagagtgaaggagaggggtctacaggtgagctgaatgctgcatggcattgaagtaatcacaccagtcgtcacaattctctcctctttgatggttatctgttgtcccagaaggaacaatttcagaaagtccttttctggactgtagaatagcacttgcttatttgatgagccctgagaagcattactgaaagcggttcattgtccctgaggtattacaatgagatggtggtcactgatttcattatgttttcctttattgcagctgttggtttgatcctttgccaggtgcttaaaacaattgtggttttgcagatggtaagttagaggttggacaaaaaaagggatcatgtcactgccctggccaaaatttcaacagactggggtctagtgagggcaaatagatagaggctttcctcttcactttgtgttatttagaaaaagaaactttccaggacaaatttctttcctagaattccttttttaaaaattttttttctttgaaaatttacttagatgcaaataatatatttttcttccttttaaataataaaagtaagatgtctcttggaggtggtggttgtcactgacaagattaactagaactgactagctgtaaaaatataatttgggatgcattattaaggcatgccatttttatttgcatgccattgtgtacagatgtggttgtgaaatagttcaaatcatggcacattgaatgtcctcactggatttttaggaatgtgttcactgagacagccaaatcctatttcattttctttggctcattgcattggctgtaaattggagatattcactttaatatgtgagtcaaaatttatttccaaacataatactgcagttgttctgtcacagaatataaatttcttatttatttccttaatacgttgctttctactttttctttttttctttattttattctggagtatgtggaaaggttttccagaaagatttgcatatgccataatctactgatgaatactttttttgggttactctttcatattttgggagatataactatggaagtgttaggaatcatgggttctggaaatagttttattactgcttctgaaatgccctcccaatgataccatatagtaattccatcagggaataatatttttattatagtttaaaatataacttaatatttaggtgctcttgttcagtcatcgtcaagttctttttatttcaccaaccctaccatggcactcctgaaagacttgtgaatgcgacagacctggatttaatcatggctttgccatctgctagccaagagaacttgaacaagtgagtcaacttcttggagtctcattttctgcttctgtaacatgggaactagggtaatctaactcattgcttgtgatgattagatgaggcaaaatgctgagttcacctagcccagcacctggtccatgggaagcatgtgggttctgctgctacccagtccttggcccagtgcatggtgcacagaagggaatctgaacaggccaactttattcctattcttgacccaccccatgtagatgcttcctacatcttcagcttcttcttcttcttctttttttttttaaggcagggtctcactctgtcccccaggctgaagtgcagtggcacaaccacagctcagggcaacctcgacctcctaggatcaagtgatcctcccacctcagcctcctgagtaactgggatgacaggaccacactaccacacttggctaatttaaaaacttttgtagagctggggtcttgctatgttgcccaggctggtctcaaactcctggattcaagtgatgccctcacctcagcctcccaaagtgcctggaaaacaggcctccacacccagccttcaacttcattttaaaaaattgtggtaaactatacaattcatccatgaaagcagaaaccacttgtaccccaaaagctattgaaatttaaaaatatatatattaaaaataaaaataaaattgtgataagatatacataatatgaaatttactactttaatcatttttaagtgtacggttcagtggcattgagtacattcacatttttgtgcaaccggaacttttcatcctcccaaagtgaagctctgtacttattttttattttattttattttttgagatggagtttcactctagtcgcccaggctggagtgcagtggtgcaatctcggctcactgcaacctctgcttcctgggttcaagagattctcctgcctcagcctcccaagtagctgggattacaggtgcccaccaccacacccagctaagtttttgtatttttagtagagacggggttttgctatgttgggcaggctggtctctaactcctgatctcaggtgatctgcccgcctcagcctcccaaaatgctgggattacaggcatgagccactgtgcccggccagctctgtgctcattaaacaatgactccaagttccccttccccacatctcctgctgacctctcttctactttctgtctctgtgagtttaactattctaggtacgtcatgtaagtgcatctatgtgatatttgtccttttgtgtctggcttatttcacttagcataatgtcttcatgattcattcatgttgtagcatgtgtcagagtttccttcctttttaaggctgaataatactccactgtatggatagaccacactttatttatccatttgtctgttgatggacatttggatgatttccatcttgtgggtatactgagtaattttgctatgaacatgggtataaaaatatctatttgagtttctgctttcaattattttgggtctacacctcaaagcggaattgttggaagtggaattgctttccacttgttggaagtggaacatggtctcccacttcattttgacacaacttccaagcttcagaactgtatttacaacagcgtgctgggaggtcgctttgagtttatgacggaaatctcatatcaacaggttttaaattgttccatacgacttcttgccacccctgtcccaattcagatcttttttttgattaatggtatgaacaattttcaaaatatcctggcacaatctattagaatatttgactttctcctcctcctccctttagccctaactatttggcaaagctgttgaaaacttcttcacatcttctctctgcctcatctactttgctactcaaagatgattagtagatgttttggtatgattttttttccttggcataactgtgaatacttttaatccttcatgttttatgacaatcatacattcccacttttgtgtaaaaacattttgaattcttctttctataacaaattctttgccagtcttccttttctttttgcttttagtgagttccaatgatatcattgtttgaacctgttttctaattctatgctgctattcccatactccctctttgctttggttacagtagataatgtgggtggtcctaccaagacaaagcatcactcaggagtcaagggctggggtagatacagacactaggtactgcagaaagtcaatatctttctcagagtgtaaggcaggacaagacttctgttcccttgtaccgttgtggctggggagttggactgtgcatttcatccttgtcatataagtcaaagtattgcccaaataacttaattttggtgtggtcttagtaagtatttgtctcgtagatatgttaaatagaagacagtaacattgggttggctgtgttaattcctcactttttctttcctatacatgagcttcctaagaagcggaacacttggtggtcagacagttgcagagattccttgcatgattgcaatctggaaagtagataccattcttgaatgaagagcttgccctttggagaagctgggctttccatatatggaggttgttagaatgcataagagttcagcttctggaatgaaaggagaccttggttcaaaacccatctgccacttgcttgctgtgtggcttaaatcaggcttttaaacttcaattataattttgcatctgtataataggattaatataattccttcctcataaagttcctagggggttaaatgaaacaatcaatgtataacacacttcctggcatgtgatgttcagtacctagaagactcggtttccttggtagagagaatatttggctagacaagcttatggaattacccccagataggaagtgagcacaagtgtgaaatgaacaagccagagcaggaacggctcttggaagcgtctactcaggcctgggcagttgctggtttatataacagtgctttgaaaattcacgtgcagattcttactattttcccaaatgttacagctcaaaactatgttgtctgtaccttaacacctaaaggataatatagtctttcactgataaaactaaaatgtcataggttttcctttggccaaatatgtatagaaacttgtgatttcacatcagatttaaagctgtatttaacactctatgaaaacatactgatgcttagaagtagaaaggaagtcagattttgacatcttacttgtcaacttaaattatttatagttcctggatgcttcaaaatgtgataaaccatagttaattttatgtaaatattcgatgagtgcctttaataaggagactgtaaaggtagccaagctttatatatgttagctacatttatgggtcaatcgggtataaaaaataggacttcgaaaataaaatattattttgtcggactcctccaatgaggctttttcgcaggattagctaaaattggctcttatttgatgtgtgagtgcttaaacattggagaattcatttttcttttagaattcatttttatttctgagccttaaaatatgaacagttagctaaatgtttgtatatgttgataaggaatgctaagtgtttattccttaatgggacgacaccttttcccggtttacataacttgccttttaatctaaccttatgaaagtctccttgactttaattttttttcagagtactgtatatctctttagggaatgcatttatttaaaaaattataaagcaagaatagatgtgatatattttgaagttttctagtcacaaattaaatccctagatgtgttgtagtttgtggagcactttgaaatgtgccaattcaagatggaaatagcaggaaagaaccattcaagtacgatttctgactccataaagttaggaagttatgataaaggaaaaataactacaccacatacttatggcacagaattgcattattgggacaaattgatcttcaaatttgtaggctatgatggaagcaaatatttgtagtatcttaatattcaactgttaagccaggagacgagtactctgaacttcagcttctcataaaatcagtcagttacatgacagtttatgtagtttatatgtaagaaaccctttgatcaagatatgccttttcttcagccttgttaatacttcatttataaggatttttatttctaggaaaataataccatagacctattttatttaaagctaaagtgtttcctggtgatggtggtgaatggggagatgattcaaggaaactgctaatcttgtagagtttagtaaaatcttggaatagaaattttaaaaagttaaaacacactatgaaaacaaatcattattagtaaaatgaaccatattaaaatgtctccataaccaacgtattatagcaggggaaaatggcattttaattcagaaaaacatttctatataaaacaagctttggaataatttgaatatgttgatttttctttggggcaatcatgaaatacagtcatattaggaaagaggcaaggcctcaaaacggaaagagtagtgaggataattcatgagcaatgcgtggcttcatggatcccttcctggccctcttcatctatgaacatctgctttatgttcatgtctggcctcacccagtgctgaagagcagactgcccctgcttagaaccaagccttgttcttgtggatttgagttttggggtcctgaggtagaatggccatcatattgttcagggtcctcaccttcccactcattacttcctttatagaaccccagtcatccccctcaggaggcctgcgctccacaaatgaagttgggggtgaggggagctttagcatctcagtattgttcagatattggatacttgttgagctccactatgtgtgtgagaatgcgctgggctcaggatcaatagccataaatgagacagatatggcccatcccttgccatgcctaaactgatctgggcattgagacaagcagttaaaacccaacatagtaagtcctatgatgagacacaaactaagcatggctggaagggcagataagatttcacagaggaactgacatcttgactggcacacttagaagatgagtaggagtcagttgggccaagaggagaaaaagtgtgtttccatgaagaagaagagcatgtgccaagtcctgggggtgagaagcatggcatgtgtcaacagaaagacatgatcagagcttggatgggagttagagcggggagagaaggcaaggaaaaacataagagctttgcaaactgtgaaggcattgcatttagatgtcatttttagagcttggaggagcctcaggacattgaggcaggatagtggcctgatggcgtatgattttaggaaaaatcactgtggccaccctgtggggaaggattggcgggggaaggctggaggcaaagggtcctgcggtgggctgtggtaatgatctgggctggagaaggtatggtggtgcccagcgcaaaattggtttcgctttgaaaaataattagaaaatatttgttttgatctgtgtgcctgtggtgggaggtggggagggagggtcaagtgaggaaggagattgaatctagaataatgcccatgtttcaggcttcacgtgcagacatttcttggttcagctgggaagtgaataggaacagactggcgaggaaagaagacagtcgtcagttctgtctggggcacatccatcttgacgagtgtgagagagtcaagtcttgatggacaggggcaggtggacattcaggaaactcaggaaagagatttgatctgaagtgaccaccagaaaatactgacggaaaagaggtgacaaaaggagagacctgcaatattatattggctttctctcaggcaactgcttggcctgtctttatattccttttgaatctctgcatatgtacgggccattatttattttcacaactaacaaatgcagactttctgtgtaatgacaacaaagccaaaccagctgctaccaaaggagggaaaatcagaagagaaggaaaaagaacaagggaagcttggggaaaagctgaatgtgggtccttctgttgctgcaggggctggggtgggcccggtgattcctactgagaggcgttttctctccccgcttcctgtctttctggttccatctcattcacctcctgtcccctccacttcctgccagtcaaaccttagattcctccagaggctttttatttttatcttttgatgggcaagaaaatagtgcggattatttttccaaaccttcacctgaacatcacatcgtggctttggccctatgggcttggttcatccgggcctgcacagaaggacttttcgggccagtctggtcacatacatcgagtcctgtcttttcagttaaaaaaaaacacacacacacacactgctatgtttcactaagacaactggtgtgagttgttttttagaaaatcaactctacttcagtaagattttctcaagcattatcttgagaagaccagataataaaatttaaaaagaatttcttcttttttttttattatactttaagttttagggtacatgtgcacattgtgcaggttagttacatatgtatacatgtgccatgctggtgagctgcacccactaactcgtcatctagcattaggtatatctcccgatgctatcttaatgcaacttaaatcaattgctttaataacacatattgaccaagttacactcattaaggaaaaaaaactactttgttgtttttcttcttctgacgtgagctgaagacttagaaatagttgttaatagtgtttggttaataagaatttgttttaattgcatatatcaaatatgtatttattaaacttttctttttgtcagtttatcaattctagctttgtcacaaaaggtttgccgtatgaacatgattctgttgtacatctatttccatttttgttaagagacgaattcaattgtaaaaatctagtaccttttattcattaaacatgttagttcaggaatttcacttggttctacaaagatacatatctacagtggatggccagtgcaaacatgagactcagccaactggtctctgacccaattcagttctcctgtcttcttctggcttacaaagtaactggctctggggagaaagtgagtcaaagtaatatttggtttgaatggttattgactattttcttctgaaacttaatgtatactaattaattttttattttattcttttttttttagagatagggtctcgctctgttgtccatgctggagtgcagtggtgctatcacagctcactgcagccttgacctcctgggctcaagcgattctcctgtctcagcctcccgagtagctaggattacaggcatgtgccatcatgccaggctaatatttaattttttttttttgtagagacaagatattgttatgttgcccaggctggtctaaaactcctggtctcaaactatcctcccacctcagcttcctgaagtactggaattataggcatgagctgccacacctggccatatactcattttttgttaaaagctgaaatatatcagcatatactgcataaataccacaggagactaaacactgaaagtttctttagggtatcagaagaatacactttttgcttgcagttagcatctgcacagataagttttgtttctggttctattacttcttcagtttgaccctattaataaggacaattctaaaaataataactgtgtctggatatctgaatccgtgtgtggtcttttactgaagttacaggtttataactctgctgactagtttgctggtttctgttatgcaatagaagagtgcaaatgttaatttgatctgaagcccgtgtatacagtgacttttataatgtatatttaaagatggaaagccaagttttatgaggccagcatttcttgtcaagtcctcactccaccctcttctaattgggcctgacccttaagttgaataaagaacaaagagctctgtagttaaaacatttcactgcatgttgcatcttgcccttagtaaatggaaaaaaatagagacttaagcagagaatctgaactagggtgtgaaatatatattcagttttggggtgggagaatgagaaccatgttttacaatagtatacataacttccttagtctaaattcaggacatttccccaagatatgtaagaatttagacttatgcagacagactttataaaaacatgccaatatttattagtttgtgaattttaatattctgctccctataaaccagatttattttgagggataaagggatggaggtgacttctaaatcttagagcagaaacttcctgtgggcagctggacatatgtaccaggagctcagagaagagggttgtgttgggagcgtacattctgagtgatctgcatttggtgatgatggaagccatggacatgcactagattgtcttgtgggagaatatggagtagtaagagaagaagaagacctaggattgagccctgagcacctctggcttaatgttggatggaggaaattgaatctgtaaacaataccgggaggctgcagcctgagaggcagaaggaactggggtgtttgggattatggaagccaagggaaaaagcctgtctcacagcgggaagggaggtatcaacattgtaagctgcttcagataggttatgtaggatgtggactgaaaaatacctgtaaaatttggcaacgcgattcattggtaatcctagggaagttgcttttttggggtaactaaggtggaaaacagattggtgtgggttgagcaatgcaagagaggtgaagaaaaggagatttcatgtgcagacgtttctgagttcagctgggaacaagggataagatagaagatggaagttagagagcatgtggggcaagggagactcttttatgggacagtctcgcatgtgatcaaagccaatgagtaaggagcatttgagggagagagagtcaatcaacaagagagaaaagaaagagggttcatcataaaataacggtaacaacaacgaacatcttttgagtgttttctatatccggggaactatggtaaactcctaacctgcattctcacattcaattcttagaatcgttggatgtggtgggttccatgatttcctctagattagcgaggaggaaagagagatctagaaatgtcaggtagcttgctcagagttctccaggtagtcagtcatggactaatttgtgaactgaaggactgaacttcgtcaccacccagcccaccaagccggcttgactttaggtattctgtgctgcatgtgagtaccgacttaaattatattttaagaagggctactttgaaactctctctctgaaaactctatttctaaaagctctaccctcacaacaattttggcaagcagtcttggtaaaaccaaaccaaaccaaaccaaaaccaaaaaaccttatctgctgagaaaatataaccacataaaatatggtgctacaaaatatagactgtgtgaactgaaggtgacttgcccaaaggactcctgaagcaattggctgctgtagaaattaagtccacgggaggttttttgttctgtttttttttttttttttttgagatggattctcactctgttgcctaggctggagtgcagtggcgcaatctcggctcactgcaacctccgcctcccgggttcaagcgattctcctgcctcagcttcctgagtagctgggattacaggtgtacaccaccatacccaggttttttttgtatttttagtagagacggggtttcaccatgttggtcaggctggtcttgaactcctgacgtcgtgatccacctgcctcggcctcccaaagttctgggattacaggcatgagccaccgtgcccggcccatgagaggttttgtttgcacttcaagaaggacagaaaaaggcaggcaggctggggagcaacatagtaaggctgaggaagtgataggaaaacagcctccaaaaggtttccctgtagattctgactggctaagtttcctgaaataatattaattctgtcctcttgcttttaataggacataacgactatatgtgtccagccaccaaccagtgcaccattgataaaaacaggaggaagagctgccaggcctgccggctccgtaaatgctacgaagtgggaatgatgaaaggtggtaggtacatctctcccaggggcccttggggatggccctggccaccgcccagtgctggctctacccattggaataacaccatgggaattttgtgtttttttcttttaattgttttttttctattcttatttttctttgcaacaaaagtattttcataatccattttattttaaaaaggtggaagtgtctggaactggaaattctaacatggcattttgtgttttggattttcaatgtaaataattatattttaaatcaaaggtgtgtgggaggcggtgatggaaggaaacgaagagtgcttagtaaattattctagaaatatttttcagttactgtttatgttgcaaatgctagaaaatgatatctgaggataaactttccctaaattgagacttgtaaatgtgaaagctgagtagctaatttatagccttccagtctgttatcatcccttaaggaatgtgaatttcaatcaaaaggcagttttctcctttagaacctgagtgaaccagccactttcttaacctcagtgtctagcatggtgctggcatagttgattactgagcactacactaacaagtgtcagagcatgcatggtttgtgactgtgggtttgtgtttttgtggtctttgtggctgtgtgtgtgtgtggttttctgtcttctcatgtatccgatcttccagttttgtcatacaggaatctggaaactgaatcccagttctgggaatattaggagccccataaatgtggttgcctgattgacctcattgtattcttgggagtctcatcttgaggaacattgcttctagtcttggatagccttcagtgtagtggaagagaacaagtagaaaatgtgtaattaaaataaagtcatgaggctgaggtgggcagatcatctgaggtcaggagttcgagaccagcttggccaacaaggtgaaaccctgtctctattgaaaatacaaaaattagctgggtatggtggcgagtgccagtaggcccagctacttgggaggtggaggcaggagaatcacttgaacctggcaggtggagggggcagtgaactgagatggcgccactgcactccagcctgggtgatagagtgagactctgtctcaataaataaataaataaataaataaataaataaataaataaataaataaagtaacggattcatttagtgtttcagaaggatactgaagggagggaagggctgatgatggtgctacctgctgattgtaatagggaaaagcccgtttcttttctgaaggaggtgaagcttggggtgatttaaggagaacaaaatttcaatgaaaaggaatagtgattttgcaaatagtgggcagctaacctttaaatcattcttactgggacgcaggaggaaggagaggaaagaccaagaatggagattatgatgaagacaagcttgattgttaacaagcttacagtgacaggtttcatagtcccggggtcataaatacgccagacaggttgaggtttggaatgcagcatttggaataaattctcctggtgaagagatgcaatgttgaatttacgcattctgtgagctgtgactatgactatacatcttgaacatctgaaaaagcagctttaattcaaagggtaattaattccaagaatttaacagctacattcagaaaatgacacttgagtcatatggattaaatatttaaggaattcatctttctttgtactgttggagaattagtcaggcttaattaaacttacaaaatgcgtcttaaggtaacttggtaagtgacaggaatataacagctgcataagaaaagctttatttgaaacagtggagtcgaggtttaatattcttctttggcgattatatgtaggttaagcacaggctcttccatacattctccttgaaagctgaaataatcaagtcatgaatatgtccaaaacaatttttaaaatgtgaggggtacccatgcattgaccccatttcataaaaccgattctgtttttttttttgtaattaatatccagatacggtctggctgcatgaatataaattacgcattctcatttttaatctaacaaaaattcatatatgcaaagacataataaaagtctccccactgttttctcctaggaatctagataatttgactgtacacaacagactgtggatggctccatacacacttgcacatgtatattgatgactgtaaaatatatatctgtattagttttctagggctgccataatgaaataccacaggctgggtggcttaaacaacggaaattaattttctcccaattctggaagctggacatgcataatcaaagtgctggaatatttggtttctagtgagccctcccttttttttttttgagagatggagtcttgctctgttggccaggatggagtgcagtggcactatctcagctcactgaaaccttcacctcccaggttcaggcgattctcctgcttcaacttcccaagtagctgggactacaggtgtgtgccaccatacccagctaatttttgtgttttttttttttgtagagacggagtttcactctatgttggccaggctggtcttgaactcttgacctcaggtgatccgcccacctcggcttcctaaagtgctgggattataggcgtgagccaccatgcccggcctgtgaggcctctcttctaggcttgtggctagccgtcttctgcctgtgtcctcacatggcctttcctctgcgtccgagcactcttggtatctctttctcttctcacaagccctgttggattaggagtccacccttatgacctcatttaaccttagttaccgccaaaaaggccctatttccaaatatagtcataccaggggctagggcttcaacatacaagttttgtggggacacagttcataacaggctgccctcccaaaataccatagactgggtggcttaagtaacggaagtcaattgcctcatagctctggaggctgaagtctgagactaaggtgttggcaggtttgatttttcccgaggcctctctccttggcttgaagatggctgccttctctctgtgtccccacatggccttttctcggggcatccacagcttcttcttcttcttacgaagacaccagtcatatcggattagggccccacacacaggacctcattgaatcttaatcacctcacttaaggtacaatttccaaatacagtcacattctgaggcccagggggtaagatttcaacatatgagttttaagggtacacaattcagtatgtggcaatatcccataggggttactcagtgattgttcagtatttctttacatgtaaggaaaacatgtatctttctggcagtttttatatgtacataagttttaaatgaagctttaaattcataaaattatagcccgtgagaacatcttattttaatgatatgtataaagtacttgccataaatcaatataatttattgtattttctacaacatggaataccacacatggccacaggataccctctataacaactccttgaaaaatcccattgaataaagccttaatttacaactggaagtacaatgataactaactataaaatgtgcagtcacatggcaaaggccagctgtgactgaataaatctttacaacatgttttcaaccattagggttcacaacaatccactttcttaaccaggctggttaccaactaggatattgaaactctacctatgaaataaaaagtttagtttcagttaaaagagaaccacagacctactccctattttcatagcaaggctgaaaaaattcactgaagatctattgtaaagatccaaaagagtgcatgatttgtctccatgaactaacaattttaatctgttataatacttactgcctctgaaaatcccagcatcattattagatttggttctgaatcatggtagttctataagatgcaggatttgaattgcactttcgggaatgtgcttttctatcctagtacatgtgctggtttctctgcattgctttttcctcttcatttgtctccttcctcttgaactttaggttgtagattacatgtctcttcttcaggaaggcctacacagttacctgacagttcctgaggctcgaagttcaaaatcaaggtgctggaaaattcatgttctagctttaatggcaaacagctcttctcttagctcttatcaccattattattagtcattcaatgtctgtctttacatatggtccataaactccatgatggcgcgggggtggggggtctctgtgtcttgtttaccgatcttgcatgaaacaagtcacaaggtaggtgttcaagaagtatttttttgcactaattaatgaattgattcaattcatttaaatagttatttgtgtagggcttcttatatgcaaacccttgggaataaagcaaatatgaataagattgtagtcccttccctcaatgtcctcacagtataaagagaacatttgcatgggaagcggcaaataaaaatctcaacggcaagtggagactgggttgcaagatggctcaaatattgaatgatcagaatgggagtctagagctttaaacaaccactcccaggtttagtccaactcagagtattactcagacacctgacatccaagacatatattattactcaagaatgtggcctttttgctgagtttggtagaaagaggaactcttccaaagataaatgtgttcaaatgctggctcctcctcaaacttgctgaacaaccttgttaaagtcacttttatgagcttcactaatttcaaatatgaaatggagataaataaattttattgtccaagcacggtggcttacgcctgtaatcccagcactttgggaggctgaggtgggcggatcacctgaggtcaggagttcaagaccagcctggccaacaaggtgaaacctcgtctctacaaaattagccaggtgtgatggcagaagcctgtaatcccagctactcaggaggaggaggcaggagaatcacttgaacccagtaggcacaggttgcagtgagccgagattgcaccactgcattccagcctgggcaacagagtgagactctgtctcaaaaataaatatataaataaacaaataaataaattttacttaatgagtttgtcatgaagatgacaaatcgtaacatgggaaaatataaatctaaagtgccacacaagtgttagctattacatatcttttttgtcttaaaaataattactatcttagttaaaaatttcatcatatacgagcactgctgggttttttttttcagctgaaagaaagagaatggcaatttcatcacttctacaagatataaatttctaatttctttgtggagaataaaaacttggcttaaacacctaagcttttttttcttttctgatctcatatgctgaatatagctgaatgacaagtgagatgtgttatttatcattttatgatgccagagatttacacgaatttgtgaaaggttttttcttaccatagattcagaggcgtgtttgaggcaaggttttcattgtgcagtgaggaaattggcacatagaaatcaattgatgtgcaggactcttggactgactattctggttatgtttccttataacacattaagaagaaatttgagataaagtagtaattgtcaactagtctttatttattttaataacaaatgttgcagtataatttttagaaatattccaaaataacaaataaatccaaaaattaacgggataattttaaagtgagaaaataacatactactaatatagacagggaaatatacatgtgtccagaatgattcagaagcccaatgaaacactggaaaataaaatattttcctgttgcttgggtttaatatttatcactatgagttatcgtaatttgctttattgatggataaactcccaacctggggactgcgattggaatcctctttaatcctacattggctatcctttatcaaaagtaaacaaccggctggccatggtggctcacacctgtaatcccagcattttgggaggccgaggcgggtggatcacctgagatcaggagtttgagaccagcctgaccaacatggtataacctcgtctctactaaggatacaaaaattagctgggtgtagttgtgcccacctgtaatcccagctatttgggagcctgaggcaggagaattgcttgaactcaggagacggaggttgcagtaggccaaaatcacaccactgcactccagcctgggtgacggaatgagactccatctcaaaaaaaaaaaaaaaagtatacaaccaattattaatgttcatgatggtagaatcaaattaataaattaaaaatgtagatgtgaattactttttttggattgccgaataattgtggaagatttgtagctgcatgtgaatccaagtttcctcaaaaggtaggttggggtgctcctatttaggattgaatttaagaaaaatgttaaagaaaagctagctgctctttaccaaagagagactggttgttttaagcagtaatctaatctatatatttatgatattgaaactattattttattaattcatataatagatatttattaaaaactccccatattataattttttatttgcaaacaaatatactgaatcaagtaagtgaatcacatatggaccttaaagactaatgaatccaatgtttgacagtattttatatcaatcaagctctggtttccacaagcagaagcagatcgtcatctatgaaacagataaaagttgatttggcataccctctctttattcattatgatgttcatgagaaaccttcttagaaccctagggctccaaggaacacagtttgcaagccactgatctaatctaactccttcatcctctaggtatgaaaatcaaggccctccattacctattagggatgaaggcaggtcagcctctgtgactgtcagttcagctggaggaagcatgagtgtaggcagcacaacaatccctataaggaccatgttcttaagctggttttttttttcctagtagtttttacagtttcaggtctaacatttaagtctttaatccaggttgagttgatttttgtatacggcatgagataagtgtccaatttcattgttcggtgtgtagatatccagtttctctagaaacatttatcaaagaaactgtcctttctccattgtgtgcttttagcagctttgtcaaaaattaattggctctaaatgaatgaatttatttctgggttctctattctgttccattggtcaatacatgctgttttaattactatagctttatagtatattttgagtcaggtagtgttatgcctctagctttgttcttctagctccagattgttttggctattcagggtttttttgtggttccatacaaatttttggattgtttttccacttttgtaaaaaatgtcattgcaattttgataggcattgcattgaatctgtagattgatttgtgtcatatggatatttttaacaatattaattcttccagtctatgtatggtatatctttccatttatttgtgtcttcttcagtttcttttattgatgtctatagcttttagcatacaattctttcacttccttggttaaatttattcccaaatattttgttttatttttatagctattataaatgaaatttcttcttgatttctttttttggatagtttgctgttagtgtatagaaacactactgatttctgtatgttgattttctcttctgaaactttactgaatttgtttattagttctaatagttttttgtgtggagtctatacttacatgatctatgtgtaagatcatgtcatcagcaaacacgggcaatttaacttcttctttttcaatttgcatgcctttattttttttcttgcataattgctctggcaggaactctcagtactatgttgaatagaagtggtgagagtgggcatccttgtcttgttattgatcttaggggaagacttttcaaattttcaccattgagtatgatgttagctgtaggcttgtcatatatggcctttattgtgttgaggtacactctttctatatttaatttgttgagagtttttgatatgaaaggattttgaattttgtcaaatgcattttttcctctattgagatgattgtatggtttttgtccttcattctgttaatgtgtgtaccatagttatagatttgcatatgttgaaccatcgttgcatccctgggcaaatcccactcgatcatggtgaatgattctttttcatgtcatgacaatcaattttgctagtattttgttgtggatttttgcatctatattcatcagggatattggcatgacatttaattttcttgtaatacccttgtctggctttagtatcacagtaatgctggccttgtaaaatgagtttggaagtattccctcctcttcaatttttgggaagagtttgaggattggtattagttctttaaatatttggtagagttcagcaataaagcccattaggtcctgggcttttcttccatagaggactttttattgctgattcagtcttctttctagctattggtctggtcagactttctatttcttcatgattcagacttgctaggtttatgtgtctaagactttatccatttattccaagttatccaagttgttggtgtgtaattcatcatagtactcttataattttttgcatttctgtgctatcagttgtaatgtctcctcttttatttctgattcagtttatttgtgtcttctcactttttttcttagtctagttaaaggttaatcaattttgtttatctttttaaaaacaaattcgtagtttcactgatcttttgttttgtgtttttagtctcaattttatttatttttcctccgatctttattattttcttccttctactaacttggggcttagtttatttttatttttctagttatttgtggtataacattagattgtttgagatcttcttctttgatgaagacatttattgctataaacttccctcttgaaaatactcttgctgcatcccacaaattttggtatgttgtgtgtccattttcatttgtttcaagatatttttcaacttttctttttatttcttctttgacccactggttggttctgagtatgttgttttattttcaagtatttgtgaattttccaaaattattcttgttgatttatagtttcatattatttatggttggaaaaaatacttgatatggtgtcaatgttcttaaatttattaagacttattttgtgtcctaacatatgaactatactgttttttttctttttttttttttgagacagagtctcactgtgttgcccaggctggagtgcactggctcaatcttggttgactgcaacctccgcctcctgggttcaagctattctcatacctcagcctcccgagcagctgggaatacaggagcacaccgccatgcctggctaactttttgtattttttagtagagatggggtttcaccatttgggtcaggctgctctcaaactcctgacttcaaatgatctgcccaccttagcctcccaaagtgctgggattacaggagtgagccaccgtgccaggccatgatctatactgttttatctaacattcagtggataatgttccatgtgtatttgagaagaatgtgtgttctgttgctgttggatgaaatattctgtatgtatctgttaagtccatctgtgctaaagtatagtttaagtttgaactttcattattgattttctgtccgaataatctgtccattgctaaaagtggggtactgagttccccaatattattgtattacagtctatcttccctttcatatcaattaatatttgtttcattcatttaggtactccaatgttgggtgcatatgtatgttcacctgttatatcctcttaatgaattgaccctcttgtcattatttaatggccttctttgtcttattttatagtttgtgacttaaagcctattttatttgatataaatatagctgtctctgctttcttttggcttctattttcatagaatgccttttttggtcccttcgccttcattctctgtgttttcttaaccatgcattgaatctcttctagacatcatataacagggtcttgtttttttaaatccatttactcactgtatctctttcttcctatcttgctgtcttcctttgtgattaggcgattttctatagtggtatcctttgaattcttactttttgccttttgtatatttgctacaggattttgctttgtgattaccataaggcttacataaaagatcttatagttataccaggctatgttcaactgtttataacataactttgattaattttttaatactcaatttatttgattgcttatttagagataattttgattcctatcagaagaaaactgaggtatctttatgtaccttttcaggaatgaccacgtctcaccttaccttgaatgttacaagaaatgctggcagtgactcaaggccaggcaaaaatttcagaaagggtttatcttgtttgtacaattttcttttgcaaaaataaatgattcttgatatgatgtaaggactttttccgtagatagaacctataaaatgcagaactttggggcagtaattatatgaatgaattgctactttaaaattctgtaagtccccaggaatttccatatgcttttttttgtttgtttcagtggttgtgatcaggctaatgggtagtttttagagctgaaaagaacttaaagatcatctagtgcacctttttgtttttcagttggattgttcttgtccaaatcactaagctaagttaactgctcagacaggaaaccaagtctcctgacccatggtttaatgctcctttcattgttatgcgtctgcctggctgacctgttagtaacataaagtgtcatgagagatagacatatgcatgagtaagatattaatatcccataaaccaaaactgtgacttaggaaatgttacggtgggcacaggatattactcctcttcaacaaaaacatcaatcatatgttggcttagttgcacagcagaagtaccaaaataaatttatatagacggtgtcacagatactttaaaaagacctacttaagatttaattacctaatattatttaatatttaatataatttaaaaggggcatttttatctttcagccaaggttttaattgtttttagataattctatttttgaaagtctgattttgttttaaaatgcccattctggtatataaaaacatcattttgtcaaataggagtcccagctaagggccaagcgtgcaattaaacttgactctttacctactacctaggaaccttgggcagatcacatactttttcttcactcagtttttacttctgaaaaatgccagctgaagtatgtttcaaatcttaaattttatgttttatgatctaagttcagattaacaatggaatggttagaatccaaagctaaaggtagtatatacaagtgtatattgggggttgggagcaactgccgcagctatcatatttacatttcaagctcaatttagaacaactgcgggcaactgtaaaaaccggtaggaatgggcagagttattgtcttcactagtcattgtggaaagtgaatctcttctgaatggagagtcacaaaaatgagtttgatgctttcatgatagtgaaatgagaagatggccatatattgctataaatcaccagcaacataaaagaaaaaattcaaaaatcaagtttgttgaggcaggactctgaaaagataactaagcttttttttttttttttttctgttagagatgtaataatcatgactaagactggaatcccaagagctggtgagactttctagtttctgccttgtggaaagagaaaggaagaggccaaaaaagataatgaattttggaaagttcctgattaaatatcgcataggctagtctggttatgtctgcttgaaaacttatccagtaggtataaaccaacacacttgaggccagtctttttggaaattacagaaatatatgtcagccttaagagacatcctatgatgaagagcagagggagttgtttataaagaaatgttctcattggctgggcatgatggctcacgcctgtaatcccagcactttgggaggccgagctgggtggatcacttgagatcagaagttccagagcagcctggctaacatggtgaaaccccgtctctactaaaaatataaaaaaattagccgggcatggtggcgggcgcctgtagtcgcagctactcgggatactgaggcaggagaatggcgtgaacctgggaggcggagcttgcagtgagccaagatcgtgccactgcactccagactgggcgacagagcaagactctgtctcaaaaaaaaattagccaggcatggcggggagcgcctgtaatcccagctactcaggaggctgaggcagggaaattgcttgaacccaggaggtggaggttacagtgagttaagatggcaccattgcactccagcctgggtaacagagctagactccatctcaaaaaaagaaaagaaatgttctggtcatgcctggagataatacatggtttagtttatgcttgattcagcaaataaaaattggtgaggaacatacagaattatatttaggtgattatattttttatattttatatataaaatttatattttttatattttaggtgattatatttttaaacgcttgctttacaagactaatcattattacttttttaagttttgtgatatattttatttaactaatataccccaaatagtatttcaatacagaatcaacatttaaaaattattgatacattatgtatgtttttttccttcactaagacttccaaatcctccaagtgtttcacacttacatcttattttggaccagccagattttagtgctcatttgaccatgtgatctgtgcttaaggaggctgctggagctgaggctgggctgcagtaccaacatagaagtctttatctgtcaaaccaggagtttgagatccctgagggatatgggaaccataaaggatcttaagcagagaagtgactttcttaattttgaacctatcctggtgttctcatagattagaggagagagatttaggagtgagggatcaagcaagaaggtggctccacattgttttccatagtagttgtactagtttacattcccaccagcagtatagaaatgttcgcttttcactacatccacaccaacgtctattattttttgattttttgaaaatggccattcttgtgggagtaaggtggtattgcattgtggttttgagttgcatttccctgatctttggtgatgttgagtattttttcatatgtttgttggccactttgtatcttcttttgagaactgtctattcatgtccttagcccactttttgatgggattgtttgttttttttcttgctaatttgtttgagttccttgtagattctggatcttaatcctttgttagatgtatagattatgtctccttctctgtgggttgtttgtttactctgctgctgctccttttgtgcaaaagctctttagtttaactaagtcccacttatttatctttgtttttgttgcatttgcttttgggtttttggtcataaaatccttgcctaagcccatgtctagaagggtttttctgacgttaacttctagaattttatggttccaggtcttagatttaagtccttgatccatcttgagttgatttttgtgtaaagtgagagatgaagatccagttgcattctcctacatgtggtttggcaattatcccagtaccatttgttgaatagggtgtcctttccccactttatgtttttgttggctttggcaaagagcagttggctgtaagtatttgggtttatttctcggttctctactctgttcctttggtctacatgcctatttttataccagtaccatgctgtttcggtgactatggccttatagtatagtttgaaatcaggtaatgtgatgcctccagatttgttctttttgcttagtcttactttggctatgtgggctcttttttggttccatattaattttaggattttttttctagttctgtgaagaatgatggtggtattttgatgggaattgcattgaagttgtagattgcttttggcagtatgatcattttcacaatattgattctactcatccatgagcatgagatgtgtttccatttgtttgtgtcatctatgatttatttctttgagaggtgttttgtagttttctttgtagaggtccttcaccttcttggttagtttttgttttttttggtttttttttttttttgcaactattgtgaaaaggagtgagttcttgatttgattctcaccttggttgctgctgttggtgtatagcagagctactgatttgtgtacattaattttgtatcctgaaactctgctgaattcattaatcagttctaggagctttttgggggagtctttagggttttctagttataaaatcatatcatcagcaaacagcgacagtttgaattcctctttactaatttggatgtcctttatttctttctcttgtctgctccggctaggacttctggtactgtgttgaatagtgagagtgggcatctttgttttgttccagttctcagaggaaatgctttcaacttttccccattcagtattatgttggctgtgggtttatcatagatgccttttattacagtgaggtaccttgtataccgattttgctgaaggttttaatcataaagggatgctggattttgtcaaatgctttttctgtatctattgcgattattgcgatggtcatgcgatttttgtttttaattttgttcaggtggtgtgtcacatttattgacttgcatatgttaaaccatccctgcatccctggtatgaaacccacttgatcattgtggattatctttttgatatgctgtttgatttggttagctagtatttcgttaaggatatttttttgagatggagttttgctcttgttgcccaggctggagtgtagtggcactgcaacttccactttctggtttccagcgattctcctgcctcagctccctgagtcgctaggattacaggcacctgccaccacacccagctaatttttgtatttttagtagagatagggtttcgctatgttggccaggcgggtcttgaactcctgacctcgtgatccacctgccttggcctctcaaaggactctcaaagtgttgggattacaggcgtgagccacagcgcccggccagatttttgcatctatgttcattaggaatattggcctgtaggtttctttttttgttttgttctttcttggttttggtacaagggtgatactggcttcatcgaatgatttagggaggattccctctttcttcatcttgtggaatagtgtcaataggattggtaccaattcttctttgagtgtctggtagaattcagctgtgaattcatctggtcctggactttttgtgttgttggtaatttttaaattaccatttcaatcttgctgcttgttattggcctgttcaggatttctaattcttcctgacttaagctaggaggtttgtatctttccaggaatttacctatctcttctaggttttctagtttatgtgtgtaaaggtgttcatagtagccttgaatgatcttttgtatttctgtggggttggttgtaatatctcctgtttgtttctaattgagcttatttggaccttctctcttcttttcttggttaatcttgctaatggtctatcaatttcatttatcttttcaaataaccagcttctttttgtttcatttatcttttgtatttttttttcaatttcctttagctctgctctgatcttggtattttctttcttctgctggctttgggtttcgtttgtttttatttctgtagttccttgatttgtgaccttagattgtctatttgtgctctttcagagtttttgagtaggcatttaaggctgtgaactttcctcttcgcattgcttttgctgtatcccagaggtttggatggttgtgtcactattattgttcaattcgaagaattttaaaattttcatcttgatttcattgttgacccaatgatcattcaggagcaggttatttcacttccatgtatttgcatgttttggaaggttccttttggagtcgatttccagttttattccactgtggactgagagagtagttgacatagttttaattttcttagtttttttgacacttgtttgtggcatatcatatggtctatcctagagaaagttgcatacgctgatgaatagaatgtatattctgtggttgttgggtagaatgttatgtaaagatctgttaagtccatttgttccagggtacaatttaaatccattgtttctttgttgactttctgtcttgatgacctgtctagtattgtcagtggagtattgaagtcccccactattattgtattgctgtctgtctcattacttaggtgtagtagtaattgttctatacatttgggagttccagtgttaggtgcatatatatttaggattatggtattttccttttggacaaggccttttatcattatataatgctcttctttgtcttttttaactgctgttgttttaaagtttgttttgtctgatataagaatagctactcctacttgcttttggtgtccatttgcatggaatgtctttttccacacccttaccttaagtttatgtgagtccttatgtgttaggtgagtttcttgaaggcagcagatacttggttggtgattgcttatccattctgcaattctgtatcttttaagtggagcatttaggctatttaaattcaatgttagtattgagatgtgaggtactattctgttcatcatgccatttgttgcctgtataccttggattttttttagtagtatttttgttttatacctccaatgagatttacacattaaggaggttctgttttgatgtgtttccagcatttgtttcaagatttggagctccttttagcagttcgtgtagtcatgtagtgctggcttggtagtggcgaattctcttagcgttgtttttatctgaaaaagactgtatctgtccttcatttaagaagcttagttttgctggatacaaaattcttggctgctaattgttttctttaaagaagctgaagatagggccccaatcccttctagtttatagggtttctgctgagaaatctgttaacttgatgggttttcctttataggttacctggtgcttttgcctcacagctcttaagattatttttcttatcttaactttagataaccttatgacaatgtgcctaggcaatgatctttttgtgatgaatttttcaggtgttatttgagcttcttgtatttggatgtctaggtctctaataaggctaaggaagttttcctcaattatccccccagatatgttttccaaacttttagatttctcttctttctcaggaacaccaattattcttaggtttggttgtttaattctgtcccaaacttcttggaggttttgttcatttttttttttttttcttttcttttttttttttaattgatcattcttgggtgtttctcgcagagggggatttggcaggatcacaggacaatagtggagggaaggtcagcagataaacaagtgcacaaaggtctctggttttcctaggcagaggaccctgcggccttctgcagtttttgtgtccctgggtacttgagattagggagtggtgatgactcttaacgagcatgctgccttcaagcatctgtttaacaaagcacatcttgcaccgcccttaatccattcaaccctgagtggatacaccacatgtttcagagagcacagggttgggggtaaggtcacagatcaacaggatcccaaggcagaagaatttttcttagtacagaacaaaatgaaaagtctcccacgtctacctctttctacacagacacggcaaccatccgatttctcaatcttttccccacctttcccccctttctattccacaaaactgccattgtcatcatggcccgttctcaatgagctgttgggcacacctcccagacggggtggtggccgggcagagcggctcctcacttcccagtaggggcggccgggcagaggcgcccctcacctcccggacggggcggctggccgggcggggggctgaacccccacctccctcccggacggggcggctggccgggtggggggctgacccccccacctccctcccggacggggcggctggccgggcggggggctgacccccccgcctccctcccggacggggcggctggccgggcagaggggctcctcacttcccagtaggggcagctgggcagaggcgcccctcacctcccggactgggcagctggccaggcggggggctgaacccccacctccctcccggacggggcggctggccgggcggggggctgacccccccacctccctcccggacggggcggctggccaggcggggggctgacccccccacctccttcccggacggggcggctggccgggcagaggggctcctcacttcccagtaggggcggctgggcagaggcgcccctcacctcccggactgggcagctggccaggcggggggctgacccccccacctccctcccggacggggcggctggccgggcggggggctgacccccccacctccctcccggacggggcggctggccgggcggggagctgacccccccacctccctcccggacggggtggctgccgggcggagacgctcctcacttcccagacggggtggctgccgggctgaggggctcctcacttctcagacagggcggttgccaggcagagggtctcctcacttctcagacggggcggcccggcagagacgctcctcacatcccagacggggcggcagggcagaggcgctccccacatctcagacgatgggcggcagggcagagacgctcctcacttcctagatgggatggcggccgggaagaggcgctcctcacttcctagatgggatggcggctgggcagagacactcctcactttccagactgggcagccaggcagaggggctcctcacatcccagacgatggcggccaggcagagacgctcctcacttcccagacggggtggccccgggcagaggctgcaatctcggcactttgggaggccaaggcaggctgctgggaggtggaggttgtagcgagctgagatcacgccactgcactccagcctgggcaccattgagcactgagtgcggttttgttcattttttaaattcttttttctttgtctttgttggattgagttaatttgaaaaccttgtctttgagctctgaagttctttcttatgcttgttttattctattgctgagactttcaagaacattttgcatttctctaagtgtgtccttcatttcctgaagttgtgattgttttttatttatactaactatttcactgaagatttctcccctcatttcttgtatcatttttttgacttccttaaattggacttcacctttctctggtgcctccttaattagcttaacaatcgaccttctgaattctttttcaggtgactcagggatttcttcttggcttggatccattgctggtgagctagtgtgattttttgaggggtattaaagaaccttgttttgtcgtattactgggattgtttttctggttccttctcatttggtaggctatgtctgagggaagtactagggctcaaggctgctgttcagattcttttgtcccacaggttgttttcttgatgtagtactctcccccttttcttagagatgtggcttcctgggaaccgacctgtagtgactgttatttctcttctggatctagccattcagcagggctaccaggctccaggctagtactgggggctgtctgctcagagtcctgtgctatgggctgttttcaggtctcacagcgttggattccagcacctgctctgatagaggtggcaggggagtgaaatggactctgcaggggtccttagcttttgttgtttaatgcactatttttgtgctggttggcctcctgccaggaggtggcactttcaagacagcgtcagctgtggtagtatagggaggatcaggcagtggccagggccttagaactcccaagagtatatgacctttgccttcagctaccaggatggatagggaatgaccatcaggtggggcaaggctaggactgtctgagctcagactctcctcgggtgagtcttgctgaggctgtgctgtggggcaggggggtgaggttcccaggtcaatggagttatgttcccagaggattatggctgcctctgctgcgtcatgcaggctgtcaggaatgtgggggaaagccggcagttacaggcctcacccagctcccttgcaacccccaaaaccggtctcactcctgtgccctaccaacagcatcaagtttgtttgcaggcagcggatgagcaaggctaagaacttgccgcaggctaccagcctcccagcaaagaatgtaagtagggctttcatgcctcccttcctgttgaatctgtacaccaaattcactccctcccccaagttctggccaggtgacttcatgtttggttggaattgttacaaagttcagctggaggtttccttctcgctgtggtcttttcccagttcctctggccaccctccccaaggacccctgtgagacaaggtagaaatggcttattaggggacccagagagcccacagggcttttccccttgctttctctaccctttatttcactcagctgtctaattaaatcagctccaggtaagttcatatccttctcccatgatctggagctgcagattccccagtgagggtgtgtgttcgggggtgggctatccccctttcctactttcacagcttgggcactcacagtatttggggtgtctcctgggtcctgtaggagcaaactgcttccttcacagggtctgtggattctcttggctttcctggtatattcctgtagtagttctggagcagaagtttatggtgtgagtttccacacactgctctgttcatccaagtgagagctgcaatctagtcctgcctcctttccaccattttttggccttgacgtattacatttattttatgtttgaagttttggcagttttattttgaaaattttacataacaaatgccaagccaaatccaaacttcttggcctaaatcatttacagataacctttactgagcatttactacatgaaggtgttgttgacacaggggatttaagatgtgatcactgaccacaacatccaggcaacctaaaagtgaaaagaggtcattcacaaaaaataggaccaaacttcctccattcctcaagggacctaggactggagttggcctaaaaattcctgctgtatcacctcacccaccagttttgatcttgctctcagggatcaaggaagctcaaggtttctggcccttttggctcatgttcttggaggtatattctattgtcaagttaaagtcgtacccatcctagatctgtttctctctctttgtggttccagtctcatagaaaacataactatgtgaaaacaccaactaccccataaagctattctgagactcaaagacatgaactctattttgataatcacaaattgatgtatagatgtcagatatcattcatgtattatgtagcattgtggtttaagtcttagctgttggaatcagactacttgcattcaaattttagctctgttgataggtgtgtaaccttgaacaagatacgtaacctcttcagacctttgtctctttgtttgtcaaataacgacaataataatactaacttagtaagtatgtataaggaggcatgtaaagcttctattgtatttggcttatggtgagcccttcatataaattggttacaatgggtaatgaaaagtacgttcaatttttcccacaaggatttaatctaatctctaaataaaatgccagttttagtatactgtcatcattataaggaaactataattcttaagtaattaattactttggttccctttggataattagtgatacataaaatgcagtaccttgccctgaggaacctacaagttagcctccctctaatcctggcattcaaagtcctccaccttccgaattacacctgttttttcaggcattgtctcccactttcctagcaagcctttggctccaggaaactgttctgttcattgacgacagaatgtattttgtcccgtatgcctcccttcaatctgaagttcatttttagtaattttttttattagtagtgactttccccatttactaatgcctttctctttagctcatttagaattccctggaagtcatcatgttttccttctgaattgctatcatattctgtctctgtgtctaatcagaaagttaggtgagctgctgtctcagctcctgtgttaatccaggtactgagctctttgtaccctgccagcttgagggcaacttggatgcgctggtgtgtagtgatttgcaactgtgagagagccgtttccatcaacaagtgacagcttttggttctaaacactgcttgacctcattctggtttgaacatatactttggcctctgccctctacctcacctccagttctgatcttgggcatgccacagaaccccatctacactaggctttcattttggacttctaagtcctttacttgaccacttattttctttaattgctagacttaatcatccatgcatatgacagccactcagctctgaccccaatacttcattgaggctcatgccagtctgacctctcacagggaagagcacccctgccggtgagcccctggcccttggattatgctgtcccaccagtgcccagctggctgcttggcactgcatgtgatgtatctttgtttattgatcgcttaattgaatgggatataggattatattccatgttccagatcaagttgagccaagctgacaacttagtattaaaaaaatatatttatctcctatctgtccaattaaaattttaatttctagaggtagagacagtcacattgctatttaattcctagcacagcagtatttttgtcaatatttgttattagtggtgagtttaaattataaaggaaaaaagagaagtggtgatttatgtcagcgcttggctaaactattcccttgatataagtctattattcaggtcacataagcatgactgaagtaatatcacaaccataatatcataattatctctcttgctgtctctgtcactttctcacttttgtttgtgcatagtgcatagacctgtagaaaatttattagtaatctgaagcataaaaccaaatattacaactatcataacaaataaataaaactgtgcactcctttagggagtagtaaagccatttctaaaattaagtcaaagtaagattcccttattattgagatattttagtggtatacactatcataagtaagatgaataattttgttagcagctgacactgctatatagatatttatcttgggaagttctcagtgtaacatctttactgtgtttttctctttagattatacttttatgtttattattttgtttcgtgggggattcaaaaatatgcattttatgccatacttggggattccctataaattattagttgtaatatgacagttccatcatgaattttccaggtattcttttatgcaagcagataatagctcattttggtttttaacacattcatgcatattctttctctctcaataaatatggttttaatttattaaatgaaagatttaaaaatgtgctaagcattttaataataatcgattttggattaacttgttatgtttactctagggctgtagttcaccatttattcagttaagtccttccccaaattcaatattgaacatgtggaattgattcgtttcacgtggatgtatcatttactcccaagatgttggtttttggcatttagtactggtaatgggccaggaaagtgctcatctatatttgttgttattcactgattgcatcttgcccttgcacccactgagacgatgggaaagtagcaacaatactaggtgatttctttgatttaaacccaattaaaagaattagagagttgtctgatacaaggccaaagaactaagaacagaaacaaaagcaaaacaacaaacagcagcacaaactccagtgagataaatttttaaaacattgggaatatttaaaaaataaaaacactccaatgaaccacccaggttttattaaagagtagagaactcaaacagcagaaggcagagctggtggaggaaactcagcaactgctcagaaatgaaacaacctaggaaggaggtgcgagtgacctgaaactccttttaaaaacagaaaggacaaaaagaggtatgggctgacaaaaggaaagtggtagattactgatgtattgcattatgcttagaatgtctcagaatgcgagaggcagtaaacacaccagaagaggatacaatatccggaccatgtgcaactgcaaataaatgtttgggttaaaacttggttgattctaaattacatgaagagctgatgataattgaggcagaactgatagacctaacaatagaaaaaaatcgatttaaattcagagaagaggtcatttaagaaagtataatgaagccacttaataaaaggaaatattcctctaactaaagtttgagatttagggcataatcctcaaagacaggctaatataatctattttttgattaaaaaaaggaacttttggtttaaagtaagatgttcagctgctcttagagtttatttctccatatttgggcatataagaatttaaggaaaaatatagaaatataagaaagatttcatgagaatcacaagcatagtttataggcaagatagccttttctgtttgaaagcgaaaaatactatttcaacatgtaaaaacctaagtcagttttcactggcatgtcccacaatcatgcctgaaataatggttgaagacagatgtgagacatttcaagggcaatagattaatacatgaaacccacttatgcctagcgttccattattggaacgctaagcatgtgggagttatttatatcctattgctcaaggtcatctccaaggtctgagttttcactcatgcaaaaattcaaaaaattgcaacctcggcgtaaatgggttaacaaaaagttaatgctggacagtaaaataaactactaaattagacacaccatattttttaaattataagagattaagaactatgagatatttaaaaagccacccacagaagtagtaggacaggtagagaaggataaattctaacaatcaactgtatctccaccccaccttgtaaatgacaaattagtttacttagtcaattcaggaaattaaacgtatacattttgtgttaaaacagaagactttttttaaaaaagtgtgttagttaaggttaattttgacctagttaagaaaaagcagtttagagtcttgaaatggaaatgagaaatacataattacccttaaaaataagttgatagtgaattttatctaggattcttaagacatttttaatatttaatgaaaatgaactacacaattattaaaaaatagttgcctgggtttagaaaaatgatcccttaataagacatatacaacagcctgaatttttatttccaaatactatagcaacaaaataccggcaagaaaaatgcacagaaacattggatagtctcttcttactaatcttttacagatatttatatattctgaattctaacttttaatttattttatgtattataaatgtcatctagtatgcagcttgactttgctttatggtatcatctgtttcacagaaaattttaagttgtggaatttatcgtattttttctttatagtttgtgctttaagacctgtctaataaatctttccttccctggacgctataaagttatttgtctatattctgttaaaaggaataaaactttgctttttttcacattttgttacttatttcacctgaaagagaattttgtttattatgtgaggtaggaatataacttaatttttttccattgaataaccaaattgtcccagagcaattaagcaatacattctttccctgttgatctgtgaagctacctccattaggcatgaagttgtcctgttgaagagaatctgattctgagctctcttcactatttctttatttgtctatgtctacactaaaagcaatttaatttctgtgtctttataattactttgactttataatccttgaaagggactttgttcttcttcaaaattgttttggctatttatggctacttttgctttcaaatgagtttttaaatcaaactttaatgagattgcattaaacttataaattaatctgaggaggattgacatcttcatgatatttagtcttcctacccattaacattatataactctccatttattttaggtctttttgaatgacttctaataaagtttttcaattttctccaaaatatcttacatattaaaatttactcatagctgtctcatcttactgatattttaaagacatatctttttaaaaattatattattaaattgtttcaggtatgtctttttttttgaagttttacaaatttgggattatactgcctcttcattcaacattttcccatgctgttggggatccttcaagtcaaaattattagaggagctgcattaatattccagcatggacatactataatttatttaattatttcccgaattgtatgtttttgtttctaacttcacagttttcaacatgactgggaacagcttttcttgctaaatccttgcacgccacagtaattatctcactgggccaaaagataggtactttttcatgactttcgccatatattgtcaaaatggaaccaatggtgatttgttcagaaatcatggtacatcatataaaaagattactctgcaagcatcacaaactgtgatatatagaaatgtgtttattgacatgaaatagatcatgaagaaagtgattacaaatggtatttaagcattttaagttatataggcttatactgagcaataacaaagagggtgaataaatgaatgaatatgtgattctggaagggtatgtaacaaaaggttaacaatggttagccctgggtaaggggattatgtatgacttttatttccttctttttttcttcctttccccttatgtttttaacaatgtacatgaatcgtttatgaataaaataaaaaactttgatattcttatataggtttagtaggataacatttctccttcatttctttcatttttagaaatctttcttcacggaaattcttttttttaaatgtttatttctgtctttgaggagtgagattgactggctatcttttaatacctgtgtgtattatcattattgtatcttgctgataaatttcacaacagttaattattttattccccatttcatacttagctctattttaggcaagttcacaaatatcattgaatgagttcattcaatgtcatcatgatgatattgaaatgtcaatagcagatgacttgtttctggggtgttaatatgcctgttggttacatttgtgttttttggtgatggaaggcagccactgaggcaaacagcaagaatacagctaagcctctaactgcatactcttctcactcgttgcttaaaactgaagcgtggataattggtgtgcattccctaaaaagttatgtcatgatgcagtagagaaataagttaactttcctatccctgtatcaaagtttcttttgaaggtaactgagacagcgccaaataaggagcagagtttctgtgaatcatgaaatctttctaaacaattgagaaaaaaaaaactgttctgaaacaaaaacttgtgccctatccttttatttgaatgtgttttcttaaggccacaactggcagagatttgatgattttatgtttaaagcaattttttttttttttcatagcaaggagtcccactgccatcaggttttgtttttggagagattctgtaactgacatagggtaacttactctgatggcttgctccacattcactacaagtacatactgttctgaaaaatctcaaagttgaaatatttttatttgggcaacttctgcaatcaaggtaattcactctatctttggagaataaaatggaaaagggcaacccaatctctgtgaccttaaacttccactgaaacttagagacggttagcttagctggtgagagcgtgctgctaataacaccaaggtcgtggtttctatcccattacagggcagtcaagctcaagggaaaaaccctgttctttggcacagcttccatggcctgctagccgtttacagcgaggcaaaagagtagagatgttttagtgaactaggccatgacttggggagtctccaccttgaatctggttgtgggaccaaggaagagaatctgctgaggctgggtagagagactctagagcaccttaggccacaggacagcagaggatgagaataacagaactggcttcagaaagtaggtgtcagtccaaggcactgtattcaatacatgtagcaaagaatgagcttctgacaccaggaaagtcttcagatggcagtgactgcataaaccggtgtcaggatgtctgactataaaggatgggacaccttccatcaggtgagagctctggaggtggagtctgttcctggaagaagcatgggtaaatgtcatcaaaggttccctcagccaccactgggttcagggctgaggtgcacctaggaaggcttgggcagaagcatgacccctggaacttggccaactgagccatcagagagtggtgcaggtgaggagtggtagatgtgtagtgaaccactcagctgtctgcccaggccttgggtgtggaagtagagtcttctgtgtctttgggcagactgaattataagcttcaccagatcgccaagctaggaatgttgacatacctggcttggggtcagggagggactgaactgtaggtggggggccccaacaaatctaatcataagaatctatgagcgtggagacagaaggaccaaagaagggatgctgtaaccaattatcattattgaaaaactaggcagagattacattcaattggcagtaccaccctttttatctctgacatagttccagaaggatatactatgtatctagtgtgacactgtctgatagaattgtctgaaatgatggaagtgttctgtggctacccattttgatagccactagccacaggtggctattgagcacttgatatgttgttggtgtgactgaggaactaaatttttaattcaatttaaattaaatttaatttaaatttaagtagcaacatgtggctggtggttactggattgaaccgaacagatctagatactagagtaagtggtagcagcaaatcctatattggaacaatgtaaattaacaattataaatatatgagcaggacaaagcccaaatgggcctgtactcttagttttgctatatattcaaccataactagcactcattttttaaacttataaaatgcaaactcatttggttgtgatgatgaatgctcaggtaattgttgagtttcaacacagtgacagccaggaactcattttggagacttggattgtgccacagtttgtccctctataaaatgatgatgaaaattttatcagtatctgtctcaagctgtagttaatgggccaatttctaaatattcctgtcaaattgtatagccattgttttcaaagtagttttgaaagtaggccattggtaaagcaatctattaaagtgcaggaagaaagtaatagaatctcttactttttaaagtctcattatgaaaattatatttcagtttgtatgccttcgatgtacataatatattaatacacaaatatattaatgcagcggtccccaaactttttctcaccagggactggtttcctggacgacagtatttccatggattgcagcggggatggtttcaggatgaaactgacccacctcagatcatcaggcattattaggttctcataaggagcacacagccttgagcaggtgcagttcacatatagggtttgcgcacctatgagaatctaatgctgccgctgatctgacaggaaatggggctcaggcagtaatgctcgctcactgctcacctcctgctgtgtggcccagttcctaacaggccatgaactggtaccagtctgtggcctgggggctggggagtcctgcattaatgtaattaaatatgtacatttcttgagagtgtttgttcaaatattttttcctaatagagacgtataacttagaaagtatggaaccctctggtcagtagcatattttatcaaaaaggctatccgtcgtgctaaccaatgtgattaaatgttcattttagtctcagatattttgataacataataatagggaagttatggttattgcatggcttttctttactgtattttcaataactatattaatgggttcagttgttactagttttataattctgttttattctcaatgagtcttcctgtttctccccacgtctttcctatggttcatttccctgcatctttacagctccctggaacattctctcaaatcaatcagaggcttcaaaactgggcagtctcattttgtaacctgctctgactcgcctctgggaggcctccctccccactcacagctgccttcctgcatgatgtaaaatgaatacagtgccagaaagactgatccttggaacctcttccttacttagtttctttatagttctgattttagaaatgaccattttacttccagtgcccttccccacaccagttagctgagactctatgcaggaagttcccagtgatcagaactgttcccatagctcccaggtgattctgacatgcacccggcattgagcaccatggacatggctgctgtttgttatcctcgagctctgcaaagcagtgtcggatattgcttgattgttgcacattaatctactgcacggtccggtaggtagccactagccacatgtggccatttagatgtaaatgaatttaaattaaatagtattataagttcaacacctcagttgcactctctgtattcaagtgctcagtagctacaagtggttggtggctaccattttgggcagtgctactatacaacatttctatcaccacagagagtgctgatgaataatagtactaacaactggaaacattgaaatggagaggtgaaggagagaaggcagaatataagagaaacttcaaagcattcagcgtgtctgataggcgctgtatcttacattatgtttggagcatagtttttgaatttcttaattttcaaattcggttgaaacagattttggtcaattgaagtgaaggactatgcctgctttaatttgcgtagcttacctttgtttcacgtgtctcccttattacagtgtttgtagcagcatctaactcaatccctaacttctttttggtgcagggaccatttaaaaacaatttgatcatagaggttatctcctttgcaatccatattgttttatggaacaggtgaacagctggtgacaatagcctcaaggtttctaatcccaccaaaggaaaatatggtgtcagtaattaccttgtactatgatatttgtgaaatccaagagagggctagatctcaggctctaataatacatccgtataaacatctcagtagggcaccacggaagagtcttaggatatcaggaacaataagagcgggagaatatcgaccttaatattctttacacttattaaaaagtgaaaagacagccataaagcagaatgagttcctgtcctttgcagggacatggatgaagccagaagccatcattctcagcaaactaacacaggaacagaaaaccaaacacctcatgttcgcactcataagtgggagttgaacaatgagaacacatggacacagggagtggagcatcacacaacggggcctgtcgggagttgggggactaggggagggagagcattaggacaaatacctaatgcatgtggggcttaaaacctagatgacgggttgataggtgtagcaaaccaccatggcacatgtatacctatgtaacaaacctgcacgttctgcacatatatcccagaactaaaagtaaaataaatgaaaaagaaataaaaaataataaaataaaataaaataaatgaaaagtagccattttaccagttgagtatttactgacttttggtgaaaatcactttctaagattactagaaaccttatgaccctcggcctctactcccaccacgtgcggattttcacctccacctactttgtcacgtcacatgcccttctgctctttaggacacttgtattgggttcctcccccacacgtaaacagaacacacaggtctgtgaatggacctcattatgctcatttgtctttgccaagaactattgaaaatgatcacaaatgactatgtaattataattaagattttgtacatgcatacactttatttttaacaagtttgtcctgttaaatgtcaccccattttgaatagtaacattcactggtgcaaggaagaattattaaaatgacaatttaactgatatccttgacaggtaagccagttattgtatttcataattgtgattattacaatacctatgaagattaattaggacaatttattctataggacttggttatcaaaatgatcttttttcccattttagtccatacatcttcagttttaatttccttcttccaaagaactctgagtcttgcccagtgtgatacttcagattttgtaaaaatataatgaagaagaataacatgtatcagatcttttttttaatgtactgggctaaaaattataagcaccatcaaattactagaaaattcttttaacactctgcttcttagttaaaaaatgattcctttttgtgataatcttataattttcaaagtatcattttagaaattttaaaaaattattcttgttttcattcagtccatttcatcagaacttagattttttcttccctctacagtatgtggtcttgatgtgctttctccttgcaaaataaaatctttagtttcaggatctctgtgttctattccttcaatttaaaatcataggaaaaataactatcatttccttatgtctgtctccaattcccccatcattttctgtgagccaattttcttctttttcttctgtctactgtaaggaactttttactctgctctattctctgcaattcagggctcacaatttctttgacttctcagattatcctttgtacttgtgtctactttttcattaaaaaaaaaaaggcttcggtcttattttgactttatcatctttatattgccatatttaaaacccatctgcttattgattgaaccaaacttttcatcttacttcatcatactgaatgtataacttctgaatgacttaaaaatcatcacataatgtgagagaattttctatcatattcaggtgactgcattgtaagcaatgaagttgaagaaaaatagcttataatggatataataccaagaaataataagaatgagaatctgcgtatatcatatactgggttaacaagctcacaaggcaaatcaccattttattagatatttaacaaatcatactagtactggaggaagtatagcagaaaaaaggagtatggacattgggattagctgccttgctaatcttttgtcagtccctagtgacatgcttttgggttgagtcattgttacctccctgagctgtttgtttataaaatgggggtaaatatctcagatgtttcagtgttgtgacatataaagcgtcctccatagtacataataccgtaagcactccataaggtaattcttgtccttttaaaaagtatacacttttgagttcaggacacgtacactgtaacctagttgtaaccattttaataaaagaaggttttgatcatttttgataaatgtactacatgaatagttaacttgcctttcacttcctataccaacggaaattttggtaacaaatttaaagaaagcattaggttgaatatcccatctgattaaatgtcaactaaatattgtttctggcttttaaaatatttctaattcagttataaaacaggtctattactcaggaggctgaggcaggaaaattgcttgaaccagggagtcggaggttgcagtgagccgagatcatgccattgcactccagcctggcgacagagtgagattccgtctcaaaaaaaaaaaaggtgaaatgaaaaacaaaaaagaggggtgaaatttctctgcattctccctttctgctgttgggaaagccctttcattaccaagaatgcatggaattctgcttattaatttctccatctatgtgtctctgtgaaaaatactaattatttacaattttgtaagctatgaataaggtctatgttttctctgaaattatagcaacaggagcatttcccccttatttgggccgcaatcttttcattctgattcttaccataacttctgacttctgactttatcatgtcttctgatttctactaaacatgaacagaatgaatgacttctagaaatggatacaggtgtaatacatataaggccagggaaccacttaattatctttacaaagtactaggacttcagaaaaatcaaatgatgaaatggagctagctttagtatgttctacttatcattggactattaatcatgtctgtctgatgagttacctaggacttcaactgtttttatagatttaaagaaaatattataaatgtatcttacctggatttaagactggacagctgattttggatttttttctgctaccctgttgttgatatcactgacatcagcctttgcattttgactggaggctcctttctctctttctctctctctctctctctctctataggaaaccagtagttatgtcaggttgctaagtattttcccactgaaggacaaatattctggagcagtatatatttagcatttgacatttgataaacaagcttgtttgagatattttcaatacaatttcagctttggcaattgtaagcaaaggatccagttggtaattggtgaaatgaacagatgtggacacgctgcctgcatcgagatgcattaatttttctgaaaagtggataagatcttgtgagaatgaataatggaattcaaatcagatggggtgagatatttgatattcaggaacaaatcacagtataatagatctgctactttgtttggttttaatggggagttgctaatgctgaaatatagtcagagaaaaggaacgtggaatttctatagaggagagcctggctctggggtaatactactgtccttggtggaatgttgtcttttctgaagacattggttcaattcaatacatgaaacattcatcgattattatttagaaaagctaatctactgacaagacacagagttaagtagtgaaaatacagagacctagacacagttcttattaagaaattttttaatttaggtggcatatttcagagagaaattctctgcttggggcaataggtacctcctttggaataagcatggtgagaaagaattgcttctggcagattagtgagaagagtgagatattttctttcgatgacctctctattaaaatttgagtggtaaaactttgtgatgattcaggctcttcataattcttaattttatcatcctctaataccaggacttgcccagatcaatattttaggaaacagtcatgcttgctaaacccagggatttctattaaccactagataagacataagtttgtcatgcaacaagtatttattgagtccataatttgcccagcactgggctttggtactctgggccttgatactctaggttgtgtcagagatgtctaatatatttaaggtgacagagttcacaaatgagactttatgaaaatgaatatccctttttaagtctcgagaaatatgatgtgcacccgcttgaggctttattaaatctccagcgagcatgaacttgtttgtgacccaattgtagaattgttgtatgatgactatcccactggcaggcacttcttgtccaagagaatgtaattggatgttggtgactcaagcaatcctgggaagactcctccatgaccaaattaaagacaacaggggcttggtttgtactcagctctacaccaatcagcatgagacaaagaagagatccatggcaaagtggggagactactgtttattttacaagctagagaaggaaaactgcagttcctgagttgcaaaactgctaagaaatgggagaacacagaactttacaggctgaaccttggtgtcttagttattcctcttggctacagaatgccaaccagtaggagattcatcactgagatattacagggaaatgaagccaggcaagaaaaatatgtattccctttcttctcagcccataaattttgttattaataaatcagactcttatagaacagcttgccacggctgtctctagaaatgtttttattagcagaatttttattaaaataaaatacacagtagttttaagagtgaacattatagttttaggtcataaggggtgtcatggagaacacatgtggatgctacttgccagttacttgatctaggccttgactcttggttttctgttgctcggataagttagcatgatttgacatgcagttaaaggtgtggtaacctgtgattgatttcccattcttgatgctccctgcctggacttctcggaaaatttcaaaacaattcattcttctatgagggctgcctccttggttgcttcggctaaacagtgttgagcaacaagttgggaaaggaacgttgcagtaacttttaaaaattaagttagaaacaaatgtcatcaaagtaaatgataatttgccaatatgattgagcaaaaagatgaagatgcacgctccctacgtatttgctttgcagaagaattaatttgaaaaataataacatattttaaaatgaattgtaaatataaacacatgctaattgcagaggggaatccctgtgattattcagcagtttgtgtttgtcaagtgcttttcagtcagtccattccagctcagcagggcagaggcttgggctgttgtaaacttgtgggcagatacccagtgatggggcagacatgagcaggtagggctgacagcatgtgaattgagttttcttcagtcatgctgttgcagctgctcccttccctcattgctgagtttgccacagcaggtaggaacctaactctggagcctgggatgaaggagaacccacattgggcttgaggaacaagatctgccaccctggtaggccctggttaaatctcatgcaagtgtagcaatgagagagggtatgattgagttctaatttaggaggaaaggggataatgtgccctttgcacccccaggagaaatcattgctcatctgtgcctaagtagacttatcaagggcagttggttcacaatggtgtatcaccccaaaggactatagtgttatgagaacttgccagtgtatttgaatttgggtgctggcagatgacatcatgaggtattatggttacccataaatatgctagtttattgagaaggtggtagacatgctagtggatgagagggaaggacagaagcagttagtaaacagcatctgcaacaattcagttaactggtggttgtcacagtagcatggtggaaaagttggcaattaataacttctaagaaaactgaactaatgaaccaatcctgcgtgtgctatgtgtataacctccttctcactattaacagatttgttccaaacttatataagacaatgaaaataaagcttggcaatatagggaagggatggagggataaagctgtaaatcacgtcacaggcaaattaagatataccactggatcaagggatttaatgcagaaagactgatcctaacttatttcttttatttagcaataagatttgttacttacattgattatttaaaatgagttgcattattagaaaggactattttgaagacaactataataaaatgtcagtaactgatagtagccaagatattttaaatatatcaaagttgtgtcattaatattaatgtgtcccttaatatgaagtcctgcccaggcttatttatgtattcaacagacacatacctgttgaagtgtaacagatattctggacacaagcaatggtaaacaagacagatgcagtccctgctttcatgcaatttgcaattgaatggtctttgacattttattgtgattgttttagttatttaattggagaagtttttaatttaaatttgtgttatattcagtgttaaggaacaaaaatgtaatgtgcatttctgagactcagtaacacttctggtttttcctttttcatttaaagaaaaatttagtgcccaagataagctagaatttttggaatcaagtaattgatgacctgggagccaattttattacaatagtgtttttagtggtcttagaacttttcagaggtggtagctctgaaaataacactgtaataaattcacacatacatctatcatccaataaatgttaattgaggcccactacagcattgtgttagattctgaggttacaaattgttgaccccatgtcgaacatgttgaccccatcaatgtaatcagtttgacattacacagtcatttaaacattaaagtgtcagcggatattttagttgtaattttgataagtgctctgaaggagaaaacagtgggtgttgtgaaaagcagtatttggttgattgattattatagaggatctgagaaaacttacttgaggaaggaacatttggctgaactcaaagagatgagtaggagttaagtaagcaaggaagaaaagaagacacatgaaggaggaagaatgttctagaaacacacacacacaggtatatgtatatgtacatgtatatgtatatgcatatgtcttccttagaaacatataaacagctgcaacatgattgaacttatttacccaattaccaaagcttattttgcaccatgaaggtggagataaaggctttttaagcagcaaggatagaatctttgtagtttttatttataggctggttcttctgacaactttaatttttcatctttaccaacttcatggtcttcagtacatacaatgcaatcattattataaaattatattttgactcaaactctaaggtaggatgattcagctgtgcgccatcaacatagcagcatgaatggtagagactagtcattccaaacagtgaaggggcaacgtaaaactaattttaatattatatgaaagtacttcttgcccttgactgcttttttttttttttgaagaaagcaaactttaaaaatttattttagatttacagaattattgcaaggatagtaagagagttctcatatatgcctcacccagtttcctctattatcgacatcttacattatatggtacatctatcataactaatgaaccaatattgtttcattattagtaactaaatctatactttattcagattttctaagttttcctctaatgttctttttctgtcccaggaccccatcaggatatggtatgtatagttgtcatgtcttcccaggctcgccatggttgtgacagtttctgagactttcattgtttttgataccccaggtagtttaggcattttgtagaatgcctcccagtctgaatttgtctgatgttttcctcatggtttgactggctttaatgtgttttggggaggaagaccacagaggttaagtgtgattgtcatcacatcgtatcaagggtacatgccatcaatatgacttatcactgttgatattaaccttgatcatctggcttgagatagtatttgtcaggtttctgtattatacagttactcttctccctgtccatacagtactttttggaagaagccattttgtgcagctcattttttttttaattttaattttaagttctggggtacatgtgcagcatgtgcatgtttgttacatagttaaacgtgtgccatggtggtttgctgcacccgtcagctcatcacctaggcattaaagccaacatgcattagttgtttttcctaatgctctccctcccccaaccccaatctgacaggtcccagtgtgtgttgttcccctccctgtgtccatgtgttctcattgttcagctcccacttctaagtgagaacatgtggtgtttgggtctctgttcctgcattagtttgctgaggataatggcttccagctccatccatgtctctgcaaaggatttgatatccttcctttttatggctgcatagtattccatggggtttatgtaccacattttctttatccagtctatcactgataggcatttggtttgattccatgcctttactattgtgaatagtgctgcagtgaacatatgcatacatgtatctttgtaatagagtgatttatatttcactgggtatatacccagtaatgggattgccaggttgaatggtatttctagttctagatctttgaggaattgctacaccatcttcctcaatggttgaactaattaatttacattccgaccaacagtgtaaaagtgttcctatttctttgcaacctcgccagcatctgttgtttcttggctttttaatgatcaccattctgactggtgtgagatggtatctcattgtggttttgatttgcatttctctaatgatcagtgatgttgagcttttttcatatgttctttggcctcatgaatgtcttcttttgaaaagtgtctgttcatgtcctcttccaactttttaatagggttgtttgtcttttcttgcaaatttgtctaagttccttgtagattctggatattaaacctttgtcagatgtatagattgcaaaaaatttcccccagtctgtaggttgcctgttttctctgatgattgtttcttttgctgtacagaagatctttagtttaattagatcccatttgtcaattttggcttttttttgcaattgcttttggcagttttgtcatgaaatctttgcctgtgcctatatatttattgcatagattttcttctaggggacttcaaactatgctacaaaacttcaataaccaaaacagcatggtactggtacaaatacagacacatagaccaatggaacagaatagagaactcagaaataagaccacacatctacaacgatttgaccttcgagaaacatgaccaaaacaagcaatggggaaaggattgcctatttaataaatggtgctgggagaactggctagccacatacagaaaattgaaactggaccccttccttacaccttatacaaaaattaattcaagatggattaaagacttaagtggagctcatatttaaggagtgagaagatatgctctacctctttaagggtggagtagctctataaattatttggaagtgtctattctcctccattaatttatttagtcaacaattagtatcagccatctagaacccatgaatatttatgctttgggtacagtccaatactattttattttgtagctcatcttgttccagctttggccatttggagatttttcagttggctcctgtatctctttggcttcttacatatcattgtagggttttttaaaagccttttcttactttctgtcactacaagatagttcagacttatcttctgtattttttgccccagttctatgatcagccacttctccaaggagcaataatttccttcaatgaaaaccaagatatgggctgttggtgtacttgttgttattgtgtgttgttacttctagatcctctaagctgatagtgcaaagagatatatgtgtgtgtaccaacctatatatctacacacatataaaaatatttctatttgtaaccatctgtatctatcttaggctaaacctgagtacctactgatgtctccaattctaacctgcaacagcatggaacattctagccttctcctcttacttatctgtcacttcctataccaatagtgagaaacctggctcctaccatctgctatttatttacttaattatttaattccactatacttctatggaagtttcagaattgttaatctgtactcatgtacgaaacaactttatcaactagagtatagtgtttatatacagttcctttgcctttattctaacagattccacttactcattttccgagtcacttaggttagcgccttattttcctaagtccattagtgagtttgcttcatgtatttgtcatacatttaaattcttttgtaatattgtgcattccatcccagtttcccctgacatcctaaattaactttttaagtttggatacattgtggtctattctttgttctgtaaagctttatggattttgacaagtatttaatgtattgtatcaccattatagtaatatagttcctatggaatagaatagtttctatcgctgtagcatagaatagtttctctactctataaaatatcctgtgtttctctaattcaacccctccttcccaccttgaactcctgacaacccctggtctgtttaatatctttcttttgtctcttctagaatatcatataattgaaatcatacaatatgtagctttttcagactggctactttcacttagcaatattcatgtaagtttcatctatatattttcatggtctgatagctcatttctttttaatcactgaataatacttttatttatccactcactggtgaagaatctcttgattgcttctaaattcatggcaattatgaatgaaactgctctaaacatttttgtgcaggtttttgtgtgcatgtgtattttcaaattagttgggtaaatatctaggaattcaatttctgcatcattgtggtaataatgtgtttagcttcataagaaattgccaacctatcttccaaaatagctgtaccattttgcattcccaccagcaatgaatgagagttcttgatgctcgacatccttgtcagcatttgatttttgtcagtgttttggattttaactattgtaatagatgtgtagtagtgtttgattgttttaatttgcaatttctttttcttttttgagatggagtctcgctctgtcgcccaggctggagtgcagtggcacgatcttcgctcattgcaacctctgcctcctgggttcaagcaattctctgcctcaagctcccaagtacctgggattacaggcgcctgccaccatacccggctaattgttgtatttttagtagagatggggtttcaccatattggccaggctggtcttgaactcctgaccttgtgatccacccgccctggcctcccaaagtgctgggattacagacataagccacggcgtccggcctgcaatttcttaatgacaaaaaatattgaggatattttcacatactttttttgccaactgtattttttttaattaatttttatttttattttattttgtaacttttattttagatttggggtacatatgtacatttgttaatacaggcaaatttgtgtcacaggggtttggtgtacagatcatctcgtcacccaggtactaagcatagttcttgatagttctttttcctgatcctctccccactcccactctgttccctcacgtaggccccagtgtctcttgttcccctctttatgcccattggttctcattatttatctctcacttaaaagtgagaacatgcagtatttggttttccactcctgcattagtttgctaaggataatgtcctccagctccatccttgttcctgtacaggacatgctctcgtgttttttttctttctttttattttaatggctgaatagtattccacggtgtctatgtactacattgtttttttttaaaccctgcataccattgatgggcatttaggttgattccatgtttttgctattgtgaatggtgttgcaatgaacctacatgtgcatgtgtctttatggtagaacaatttatattccactgggcatatacccaggaatgggattgctgggttgaatggtaattctccttttaggtctttgagggatttccacactgctttccacaatgggtgaactaatttacactcccaccagcagtgtataagtcttcccttttctccataacctccccagcatctggttttttttgtttgtttgtttgtttttttagtatttaataatagccattctgactggtgtgagatgatatctcatcatggctttaatttacatttctctaatgattagtgatatgtagcattttttcatttgttgccaactgtatgtatttttcaatgaggtgtacatcagatcttttgcccattttaaaagtggggttttgggctgggcgcagtggctcacgcctgtaatcccagcactttgggaagctgaggcaggcagatcacctgaggtcaggagttcgagaccattctggccaacatggtgaaaccctgtctctactaaaaatacaaaaattagtcggacatggtgtcgggcacttgtaatcccagctacttgggaggctgaggcaggagaatcactggaacccaggaggtggaggttgcagtcagctgagactgaaccattgcactccagtctgggcaacaagaatgaaactccatctcaaaatacatacatacatacatacgtacatacataaaattgggtttttgttttctttttgttgagtttgaggagtttttttgtatattttgattacaagtcttttatcagccatgtgtttcacaaataatttctcccagtttgtggcttatcttttcactctcttaattgtttttttcaaagtagaaatttaaattttaatgaagcccaatttattaatttttttcttccatattgtgctattggtgttgtatataaaaacttactaccaaattcaatatcatatagaattttttctgttttcttcaagaagtagttttataattttgcattatatgtttagatcaatgattcaccttaagttttgtttaaggtgtaaggtttgtgtataagtttttctttttccacatcaatgtccagttgcttcagcaacattttctttttatatatatcttaagggtaatcagcgcaatattttctgaaaagatgacctttttctcatttaattggctcttctttgtcaaagatcagttgaccttatttgtgtggatctatttctggacttcttactctgtttcactagtccatctgtttatactttaaccagtaccatactgcctttattactgtagcctttatggtaagtcttgaaatgaaatagtgcaagtgctccaccttcttcagaattttgttcttcttcagtattaaaggctattctaggtcttttgcccttctttaaacatgttggaatcaattgtcaatatctacaaaatagattattgggatttggatttagattactctgaatctgttaattaagttgggaagaattgacattttatcaatattgaataatatgaacatgtaataatattgaactttcaatctctattatctcttcatcattttaagatcttctttcatttttcattgttttatagatttttacatataggccttgtacatactttgttaatttatatcttagtattgaatgtactattataaatggtattttctaaactttgaattcctgttattcatgatgatatgtaggaaagaaattgacttttgtatattgacattagatcctttaaccgtggcatcattacttattagttccaggggagattttgttgttgttgttgattcattggaattttctgcatagataatcatgccatctgtgaataaagatgttttatttcttccttcccaatctatatatcttttatttctttttttgccttattgcacttgctggtatttctagcataatgtataataggaggaatgagataagatatcttagaattatcctcatcttcaggggaaagtggttagttttttgtcattaagaataatgttagctattgtttttttaaatttcctatatgaaattgaggaaatttctgtctattctgaatttgctgagtttttaatcataaatagctgttgaattttgtcaaatagttttcctgtgtcaattaatatgatcatatgacttttcccgttttcactgttaatgtggcagattatattgatttattttcaaatgttgaatttgccatcagacatggaataaatcccatttgttcatgatgtataatttattttatgcatcgtttgttctgtcttgctaacattttgttgagattttgtgccagtgctcaggagagatattggtctctagttttactttcttataatatctttatctgatttgggtattaggataattctagactcagaatgagttaggatgtgttttctctgcctgtttactaacacagattgtagagaattggcacaatttctttcttgaagatttgttagaagtaatcttgccaccacctgagccagatgatttctttagaaggtaattagttattgaatcaatatatttaatatatatagagatatttaggctatttatttctccatgtgtgagttttggtagtttgtgtatttcaaggaattggtccatttcatccaaattatcaaattcgtgagcatagagttgttcataatattcctttattatccttttaatctccaagagaccagtcgtggtgacttctctttcatttatgatattggtaatttatgttttctgtctctcttttttttttgccagagtctaactctgccacccaggctggagtgcaatggtgtgatctctgctcactgcaacctctgcctcttgggttcaagtgattctcatgtgtcagcctcccgagtagctggtattacaggcatgctccaatacacttggctaatttttttttttgtatttttagtagagatgaagttttaccatgctggccaggttggtcttgaactcctggcctcaagtgctctgcctgcctcggcctcccaaagtgctaggattacaggcgtgagccaccgtgcccggcttctttttcttaattagcctgaatagaagtttatcaattttattgctcttttaaaataaccagtttttgtttcactgagtttctttatcatgtttctgttttcaattttattggcatctgctctaatttcagatgctccttgacttatgatggggttgtgtcccagtacatccactgtaatttgaaaatatcataagtcttttgacttatgtaatgcatctaacctaccaaacattatcgcttagcctaacctcccttaaatgtgctcagaacacatacattagcctacagttgagcaaaatgatctggcaacaaaacacactatagagtattgatggtttaccccgatgatcacatagctgactgagagctgcggcttgctgctgctgcccagcattaagtgagagtattgttccatatattgctagcacagaagatctaaattgaaaattcaaaatacagtttctactgaatgcatgcatattacttttgcaccattgtgaagtcaaaaaaaataataaatcaaaccatcttaagttgggaactgtctatattattctttctcttctgcttgctttaagcttatctagtttttttcttctctagtttccttaggtggtggcttaggttggttattgatattatatatttttcttatctaatatatttacttaatgctatgaatttttctctaagcactgcttttcctgcatcccacaaattttgatgttctatttttatcttcatttagctcaaaatagtttaccatttattttgaggctttttctttgactcatacgttctttaaaagtgtgttgttcaatctctaaatatttcgatattttccagctatctttctgttgatttctaatttatttccaatttggtgtgagagcctactttgtacactttctgttcttttaaatttgttaagggtgttttgtgacccagaatgtggtctatcttggtgcgtattccatcagaacttgagaagaatgtgtattaagttgtggtttgatggagtattctataaatattaattagaccatgttgattcatcataccgtttaggtcaactatatctgtattaattttctgcctgcttgcactagcaattactgacagcggaatggtgaggtttctaagtataataatggtttgggcttgtctatttccccttttagtttcaatcattttgcttcatgtgttttgattcacttttgttaggtatacacatatatacacatatttatgattgttgtatcatcttgaacaactgacccctttatcatcatctttatccttggtacttttccttctttggtagtctgctttgcatgaaattaatatagccactccagctttatttttgtgaatgttagcatggtgtatctttctccattcctttacttttaacatatcagagttattacatttaaagtgggcattattactaggataaataccaaataaagtattttgcatgctgggcttaaaacctagatgacaggttaataggtgcagcaaaccaccatggcacatgtatacttatggaacaaaactgcacattctgcacatgtatcccagaatttaaagtaaaataaaaaataaataaataaaaattaaaaagtaaaaataaattagctgggtgtggaggcagccagctactcagggggctgaggcaggagaatcaaaataaataaatcaataagtggggctttttgtagacaacatatagtttggtctttcttaaaattcaatctgacaatttccatcttttaactggtatatttaaacaatttatatttaaagcaagtgttgatatatttgaataaaaataaacctgtgtttattaactatttcatatttgttgccaaacgcttctttttggtctttcgtagttttatttgagcaatgtatgtcataccattttatcttttctcttagagtattaactatacttcttttttttttttttgagacagagttttcctcttgttgcccaggcgggagtgcaatggtgcgatcttggcttaccgcaacctctgcctcctgggttcaagcgattctcctgcctcagtctcccgaatagctggaattacaggcatgtgccaccatgcccggctaattttgtatttttagtagagacggagtttctccatgttggtcaggctggggtcttaaactcctgacctcaggtgatccaccggcctctgcctcccaaagtgctgggtttacaggagtgagccaccgcacccggcttaactatacttctttaaagaatttttgtagtggtgccgctaaagttcacagtatacatttttaagtattctaaatacaccttcaaataacactattcctttttacatgaaatatagggatattataacatagtattctcaattcctccttactgtcccttgtgacatagctgtcatttatttcatttcacttacctatatactataatcacctatacattgctgctattatgattttaaacaggcagttattgtttacgtcaattaagaatttagaaagaatttagaatcctgtgtaaaataaatttccttttattttaccttaattcatgcattctctgattatcttccatgctttatgtagatccaagtttctgacttatatcaccttcctcttgcttgaagaacatcttttaacatattctgcagggcaagtcagctggtgatgaattctctgaatttttgtctgatttttttttaatatttccttcacttttgaaggataatttccctgcatctagaattctaaattggtcacttttttcaacattttatatattttacttcactttctttattaatgtacggtttctgaagagaaatctgctgtatttcatcctgttctctatggttaggtgcttccctgccctggctctggctttttcaagattttctccctgtctttggtttttctacagtttgaatacaatatgcctaggtgttgtttgttttgtttttttgtaaggagtggcatgtatttatcttcttgatactccctgagcttcctggatctgtggtttggtgtctgtcattaattttgaaaagttctcagccattactacctcaaatatttcttcttcgcctttctttttttttctttctggtattccaattatgcatatgcttgttataccttttgctttttcattcttttgattctttacatttcagttggggacgtttctgttgacttatctttcagctcactgattatttccttggccgtgttgaatcaattgattagtcctcaaagacatttttcatttctgttacaccatttttacatttctagcatttgcttttgattctttcttaaaatttctatctttctgcttatattacccatcttttattgtatgttgtcttctttttccattagagccctcaaactctttttttttattatactttaagttttagggtacatgtgcacattgtgcaggttagttacatatgtatacatgtgccatgcttgtgcgctgcacccactaactcgtcatctagcattaggtatatctcccaatgctatccctcccccctccccccaccccacaacactccccagagtgtgatattccccttcctgtgtccatgtgatctcattgttcagttcccacctatgagtgagaatatgcggtgtttggttttttgttcttgcgatagtttactgagaatgatgatttccaatttcatccatgtccctacaaaggacatgaactcatcattttttatggctgcatagtattccgtggtgtatatgtgccacattttcttaatccagtctatcattgttggacatttgggttggttccaagtctttgctattgtgaataatgccgcaataaacatacgtgtgcatgtgtctttatagcagcatgatttatagtcatttgggcatatacccagtaatgggatagctgggtcaaatggtatttctagttctagatccctgaggaatcgccacactgacttccacaatggttgaactagtttacagtcccaccaacagtgtaaaagtcttcctatttctccacatcctctccagcacctgttgtttcctgactttttaatgattgccattctaactggtgtgagatggtatctcattgtggttttgatttgcatttctctgatggctagtgatgatgagcattttttcatgtgtctgttggctgcataaatgtcttcttttgagaagtgtctgttcatgtcctttgcccactttttgatggggttgtttgtttttttcttgtaaatttgtttgagttcattgtagattctggatattagccctttgtcagatgagtaggttgcgaaaattttctcccattttgtaggttgcctgttcactctgatggtagtttcttttgctgtgcagaagctctttagtttaattagatcccatttgtcaattttggcttttgttgccattgcttttggtgttttggacatgaagtccttgcccatgcctatgtcctgaatggtaatgcctaggttttcttctagggtttttatggttttaggtctaacgtttaaatctttaatccatcttgaattgatttttgtataaggtgtaaggaagggatccagtttcagctttctacatatggctagccagttttcccagcaccatttattaaatagggaatcctttccctgttgcttgtttttctcaggtttgtcaaagatcagatagttgtaggtatgcggcgttatttctgagggctctgttctgttccattgatctatatctctgttttggtaccagtaccatgctgttttggttactgtagccttgtagtatagtttgaagtcaggtagtgtgatgcctccagctttgttcttttggcttaggattgacttggcgatgtgggctcttttttggttccatatgaactttaaagtagttttttccaattctgtgaagaaagatattggtagcttgatggggatggcattgaatctgtaaattaccttgggcagtatggccattttcacgatattgattcttcctacccatgagcatggaatgttcttccgtttgtttgtatcctcttttatttcattgagcagtggtttgtagttctccttgaagaggtccttcacatcccttgtaagttgtattcctaggtattttattctctttgaagcaattgtgaatgggagttcactcatgatttggctctctgtttgtctgttgttggtgtataagaatgcttgtgatttttgtacattgattttgtatcctgagactttgctgaagttgcttatcagctgaaggagattttgggctgagacaatggggttttctagatatacaatcatgtcgtctgcaaacagggacaatttgacttcctcttttcctaattgaataccctttatttccttctcctgcctaattgccctggccagaacttccaacactatgttgaataggagcggtgagagagggcatccctgtcttgtgccagttttcaaagggaatgcttccagtttttgcccattcagtatgatattggctgtgggtttgtcatagatagctcttattattttgacatacgtcccatcaatacctaatttattgggagtttttagcatgaagagttgttgaattttgtcaaaggctttttctgcatctattgagataatcatgtggtttttgtctttgtagagccctcaaattcctaatcacaattgtttatctctttcctgacattccacatccaatccatcagcatgtcttattggctttactttcaaaataaattaaactcagccacttctcagcatttttaaaatcaccctaatacaaaccccctgctacctcatcaactgcaatggcttcctaacttattttgtaacttttgatctttgagttcttccaagagccaagagttcttccaaagctataaaccctatcattggcactcctctgctctatggaaagcagtggcttctcatctctttcagagtataatgcaaagctctcaccttagctggcatggccctgtgggattggcctcccttgtcttactttttccttgttcaggctgctgtgacctctctggtctttggctcttactagaaacctttgaacccgtttccttcccagtgtcagtatttgtgtgttgttcgttcacccttctcacttcattctggtttctacagcacagagaagtagtagtccctgatctaaacaccctctccacctgctttccactttgttttttcccctagcacttaccattatcagatatcatatatttatttgtttattgtctaacttcctcacaaaaatatgacgttgtgaggatagggatttggctttttgccccagagcagtgcctgactctcaataactttgttgtattaagtgaatgaataaaataaaattaaaattgattcaaagtgtatgagcatgtgtacattttacataagtgatacatgacattcttccattccttgggggctcttttaaccattctcaaccagttgtagtacctttaaaaaatcatgatgaagatgattttgagagctaattttggtaggagacagcagttttagcctgtccgctccatgtgcagaataatagcctattttattacatctgatattcaagcactagaatctatcaataggtaaataatttccaaaaataaaagcatcagtgggaaaacagggaaattatttttaaaaaagaatttctagaccaggatgtgtgcaatttgtaatctctaataagaaacgttatagctgataattccagcaattacagaatcatgatcatatccataatggatcagtagaggctctggcttatataatagcttgccctctcaggattctagagccccatatgtaaacacagaacacatttatattgattgacagtgcatgtaggtttctacagattgtgccagtcagtgttttctaaggcagttatgccatggtaattaaaattatgggctctgaaatcagcctgcctgggttcaaaccccagcttcatgtgtcagcttccttggctgtaataaggaatactaatagcacctgccttgtggctttgaaaattacatgatgtaactttgtcaagagcttagatgagcacttgggatatggcgagtgctcaataaatgttagtttaccatcatcatcatcattattattattactgattgcaagcaagacaaactggttctcacttcagcagaaaaagaaattactgaagtaattttggttagatcacagatttaacgtgaaggatgaataaccagacttggaaaacaggtggaaaccaagaggcagtcagcatggcatagcagccagcacttcaccagtgtggtgccttgggggcagcctggcaggagccactgccttcactcctggactgcagatctaccacaggacagcagactgaattgtcctatgtccagacttcacagtcacagggagcaggctgcatgcaggtggggcccaggtcacctaccttcaccctagagtctggagccacagaaaacagtaattgtccttgtagcttttgtgatggaaagcaagtcctgacacccaccaactcacatactagggaattcaccaaatgtaggacggcagctaagatgctgggaaaccaagaattaacaaatgagtattacaccaattagttaattcattacagatttcaatattttccaaaaaacatcctacaaagaacagctcactttaatatactccaacaaatgatgaaatctctccttggtcatcagcttttctaaatttctgtaactttaggtgattctgaatttcttagtgattctgaacttctagaagattctgaaacagaacagtcttactttgggatgtattcaaatcctagagatcagtcacatcaatctgtgccctttttcattatgtaacatgaaacaggaggacctttccaacttgccttgggaacctgctcctacaacagggtatattatcacatttaataaagaaagagtaatatttgcattgtgacccttcatctgaggtcatcgggactgtgctgtcctcccaagctccactgtaaagggatagacaacaaccttgtctcccagtcattgtaatctgtatcagagagcatcattagatgaatgaagatggaaatgttctcacggtcagcaggtggggaaggcaagacttgctgattggaagcaatgaaccatagttcattctaaggcttggggagagcaactttgaggaaatgaggcccctaaacttgccatgtaggagaagttggggggtggtaaattgggcaccctttatctactaaacgtaatctttacttccccaccctctaatttttctcagttgggcttgaaattgtttttgcttgttacactttatgggaaaagaaagggaaatcctaataaggtccatgccagcaaaactctagaagaagaaactaagaatttcaaattgacagtttgttaatgagaaaagacaaggttaaaggattttgttaaacagatgaccaaaataattattggaaacttctgcttctggccaaggtggaataataagggctacatttaccttcccaccagaaaatataataacaaacaaaaactggacaaaacactggacatgacactgttgtctttaaaccttggacatcaatcagtgcaggatgttattttgtaagaaagggaaaaaaattggggtgagccttctgattgtttccagactggagagaagtttcaggccacagcaagtggggaggaacctaggtgtaagtatatgtataaggtagcacatcatagtggccaaatgaatggcacaggaaagaaaaactacaagaacagaggaggtagggccacaaaactagagtggggtccaagattcactatggataaaatggggtgttaatttggttttcaaggccaatacaagaggaggcatagaaaaagaacaaggtggtgttgggaagtagtataaaaaggggcacaggcttatccttgttttataaaaaacaaaggtttttggaagggatttgtagagataagtttgaaaagtagtttgagactatgtgtggaaattcatgaatcttagagtttgattttattcaggagatcagtagcttttaaaatgtaaaataaaaccagtaaactctatctaaaataaattcttcccctaatcccaatataaaaaatacatataaaagcgtagctgctctagacaaaatggcgggtatgagatgaccagaaacctcaacagcactacctctggtagccccatagaactgccaagagttttcagagtatagttaattcctgctgacggctaaggcagtcattgagtgattggaaagaagacggaagatagacaagatcagttaattgggttggagggaagactgaagataggcaaggtgacaaattaggaactgttgcaatgatctaggcaagaaggaacctatgaactaggagggaggcttaaagacagcaaggagggaactataggcagggacatgtgaggaaatgcttagtagttaaggtgagtttgtaggtatgaaaggagagaaggaaagaacattaagtagcattaagtgaaccagataatttatagctccttgacctgaaacatttagaggctgtgataacactaataataataatctataattacataaattacgtagtgtaatgatatatcatgatataatcatcttaccaatgctttacagtcaatgacattgtggtacagagactttggaggcagatagacctcgattgtaacctctgtgctgcccgtggtatgaccttgagcatggtagttaatctgaacttctttcttttctgttaaattggggacaatgacagtacttaaccttatagtacttgaagggagagtgttagaattgatactggggagtctctccacagaaagttgtattagttattgtctttatttcattcttaatgaattagcactcccgttttctttaacatgttgaatttaaaacctcttagtgtatttctttgtcttgccttttaataccccatgaattattgagaaacaaaagaaagtgattatgcaaatgtttgaaatatctaataatacatgaacgtagtcatgggaaactggagaaataactttactgatattatactagttttttttctggaagcatagcatattaagaaaactcatttcaatgaaagaaaatttaaaaattagagtgcattagaagcataatccaatgaattctattcctaatgaatactcaggcagtatgttaactttttctgagatacaatagccaagccaaagaatttaaagaatgaaaaaaacagatgattaaacaaactgtgaagtaattagaggtagtctttgaaaatgcctcattaggcatttgactcattaggacagatccttttattttagggccaggacataattatttaagcagttgatgtgtctttagctcctttcaccttgccacaagttgtcgcctgtactgcctttccacctagcttccaagtccaggccgactttgaagagattccttagggctcacctcccctggagagtgccctctgtaccatctctctccctttcctcctcattcctattgcctgagtttattgttttaataaattcccataagttaacacctcctagggtggattagaatcattcaaatccacattgattgttactaagtagaaattttatactgagcctttctaaatccttacaacaacgtgacgaggatattatagttgctttaacccaaggagatgaaattcaaactggtggcattgcacacttacagtgggcttgcaggatgaaagagagcttggtatctcgatcccttatacaaaacaggtgggtcttgttagaaaaattcttcaataattgttaaggttaaaattttgaaaagtggttcaaagaaatttgctttgatgcaaatattgtctagtcagttacataacttgagctataatgacagtgtacactagctatccagggcacgacatctctattgtgctgttgaatatactgctcaaccattctggaaaatggcatgttcatgtatgaatgacaatgtatcttgtgtgtatggcattccaagccaacatgttggtccctgcaagtaaacttcttgactgtcaagaggctgcctgtttaatatttgcatgatctaaactaattgtttcctttgtttttttcctctgctttatgagctggtagtttgaccttttggcttttcccctgagagttaacaaaagttagacagttggggggtgaacttaagtaaaatccatatcactctatgttgctgctctactaacaattcaagaaaatgtcttggtagaaagcaaggaatgagttttaaattttctctttgaatttcaattatccatgccactcctgtggtccaccattctatataattaagaataagctgtatgttccatagtgacacaggctgttatttctgatttgcagttttcacttaacctagggtaaaattgaaatagaagtcgcatccttttttttttaccttcttccactcaattctagttagatatttttgaacttctataaaatgtctatgcaatattatcaccaataatgtgcaaaattactactcccatgtagaagaggatccattcttcattgaaccatacccttgggatcctatcacatgcagttggccatataatattttatattattgtttttttgttttgtttgttaagtttgtacctacataatggattaaattcaaaatctctgtttaactgaaacaaaatctgtttaactgaagcaaaaaaacaaaatctctgttttttgtttgtacaaaacaaaaaacaataatatttttgttttgtttgtatacttcatagggactttggaatttggaaaatatcgttcatttagggtatatatattagtccattttcatactgctataaagaaatacttgagactgggtaatttataaagaaaaataggcttaatgaactcacagttccacatggctggggaggcctcacagtcatggcagaaggtgaaggggaagcaaaggcatgtcttatatggcagcaggcaagagagtatatgcaagggaactgccctgtatgaaaccatcagatctcatgagacttatttactatcatgagaacagcacaggaaaaacctgcccccatgattcagttacctcccactgagtccctcccacatgtggggattatgggaactacaattcaagatgagatttggatggggacacagccaaaccatatcagtacattaaagaaaatatttgttagcgctaagtgaatctactttcacctacttgattatttgatgattttataaatagtcatctctttcctcatctttccagtcgtattttgttgttccaaagccaaaacctgtgtgtcttgtattcaacaacctgaatcatacagttgtgagacgtaaatgggtgtggtggttccacttacttctttacatagtactacaactaagccatctaagtagtctgctcctaaattcctccaagaagggaaatatcatgatttgatttaaatgtgacatcctttcttagagaagttttctttgtctccttcttccccagtcacttcctcccatccactgtgctttcggcagttcattcgttcattaattcattcaacgaatattgaataacttttgatcaatgtcttcctccctccaagctgaaaacttgatggagggtaacatgatctgtctttgtttaccactgcatcttccgtgaatatacattgtaagtattgaacggatttttactaaatgaacaaatactttgataaaatatttttgattactgccaatatcagtttctgaattgattctaaaattcttctgctggaaagtagattagcgttagtatgactgctgaagccttttaaagtgggtggtaatactacgtttcgttttgtttcattaacctaagtgctgttctttggaatctttttaaagtaagataaattacattcatgaaagaagcatattatttttaaagtactttattttggaaaggtaaaatgcttgtgtagttataatttggttactcttgatttcaccttaggaaaaacaatatcaccttctaaccatttcttttttagtcaaatctcttgcttctatttctctctgtagatccgctattaaagactgtaatcactgctgcatctttcctgtaaggcttgatcgcattgttaatttctttctaaacttgtagagtaggtgtataaatcgtatttgggtaatacactgactaatactgaagaaccaggcattttcttaccccagtcctcacacgaagtagggaaatacaagtcagaacttatcttctcaaaactctgacctcagaatttcctgagaaatctgaacctaaaaagattctttgcttttgacattttttctctggtgtccaccgcaaggctcttgctcttacattttttttttttttctaatgtttcaaatagaagatggtagagtcatatagtacaagctcagcatcggaggggctactggaggtcaactagtgcaaatgctttctgaataatggaatcctttgggaatacccccttgaaagtcttcatctagcctcttcttggaaaccctcagtgatacccctcatcgtctcctatgatggcagcttctatctttgtcgtcagctctgactattacaaactgcttccttacattgagctgtaactaactaaaaagtttccacaccctgcttctattttagcctttgggctcataaagaacaagttgaacccgtcttatgcagaacaacccatctacgggagatgctcaggtttcctccatgttttcctttctctaggctaacccttcgttgttcctcacttactcactatataacctgatttcatgtctccttacccttcttgttactctaacttgagtaggctagtttcaggatccagcaataagtgtgatacatcaggtatgctctgatgagttgagagtagagtggacatagcatctcccttaattcagatattgtgatctaattggcaaatctggcaataaaagttgaaatgcctgatccaggacaatggctggtcaggtgccattgttctcatcttttacttttaggtgtccctcaatttgttaagttagtacctacgtaatgtcctgaaacttgttaagtttgtacctacataatggattaaattcaaaatctctgtttaactgaaaacaaaagcaaacttcttttcagagccagaatctggaatcatacgtaacagagaatgatattgtacaagttgcttcatctctttaagtaacggtttctcaaacttacaagattattgtgagaactaaattagttctaaagtgcttccatgtaaagtgtatgtaaatgcttaaaatatatagtaagtgctgaatgcatattagaaataataataatctttattataatttttactatttcatgagaagtacttattttaatactgagcaaataggaagagttcatggcttctctatgtttttgaagtgtcatttaatatattatatatataaaacatatatatatttcagtcacacatttgtccaaataccttgacaaattaaaacaaaataagacaaaattctcacgctagttatttgttataaagtaatagaacaagtgatatgttataaagagcatttatttctcatgtctttgatattaaaaatagttgtattaactttttatcaaaacgattgcttccttcatataaatctaagaattatgctgtctgataaatattggagagattaacttctttgaaaatatagaagctttttgtctttttaaaatagttgtttttttgcagatgttaatacatttcagcagtacagtatggcctttttcaggttaaggtgctgagcccaaacctcaaagaatcactgcaaaaagattggatcccccctcttcaccccatttcgtaatttagttagtgagaaccacaactggctaaacctttgtggggggccgggcactgtggctcatgcctataatcccagcactttgggaggccgaggcaggcagatcacaaggtcaggaaatcgagaccatcctggctaacacggcgaaaccccgtctctactaaaaatacaaaaaattagccgggcatggtggcaggtgcctgtagtcccagctactcaggaggctgaggcaggagaatggcgtgaacctgggaggcggggcttgcagtgggccgagatcccgccactgcactccagcctgggtgacacagcgagactccatcttaaaaaaaaaacaaaaaaaaacaaaaacaaaaaaaaaaccacctttggggggaaattatcaaataaaacaaactctttttagaattttacaacttttatgttaggaaaaaacaaatacatttgtgaaaagcttaaaatccagtaaatgacttgagggacttggggcaatcctagggtgatgaggagcaggttagtaacagtgaaggacttagcaccccagggggccagaggctgtaatataccttatgagcaagtcattcttatttagtcttgcccattaagaagtctacttggactaaatgcttttaaaaatgcccttttaatttactattaaaagaatattcctagcagaagtagtcttggatgctaaattctattttaagaataactaaaattagaattctgttctttttataacacctgttacacacacacccctacctagtgtgtcggaatcagtttgtatgggctcaccaaagcctactgttcaattttcaggagttttgtaagccatttgatgtcagacaagtggcctgaagtttgttatggtggtggtatttacaccatgaaaattggcatgttatggtggtagtatttacaccatgaaaactgctacaaatagaaatctttttcttcttctcttggagagccacttgttgaacacttaccagctcacctgtgcttgaaagtatttcttcaaataaaatgaaagctggttagctttgaaaattttttgtataaaagtttacacgggaaaaaaataaactaatttttttttccacctgtgttttcagggatacgaaaagaccgaagaggagggagaatgttgaaacacaagcgccagagagatgatggggagggcaggggtgaagtggggtctgctggagacatgagagctgccaacctttggccaagcccgctcatgatcaaacgctctaagaagaacagcctggccttgtccctgacggccgaccagatggtcagtgccttgttggatgctgagcccccgatactctattccgagtatgatcctaccagacccttcagtgaagcttcgatgatgggcttactgaccaacctggcagacagggagctggttcacatgatcaactgggcgaagagggtgccaggtaagaatgcgaagcgcagcttttaagagtcaatagcttttcaagaacttgttgtgatgtcatgggagaaatagtgggggaaaaagaagcaataacatgttatgtaattggtttcaaggttacaggagatgtgttcattttcagtatcaatacactgtaattttccaggagattaggaaataatatttttaaatcagaatctagaagactgaaattcttaaattgacataatttatttttaacccatctcatttaccaaaaagatttagggtggacactacatggtaaaactatttaatagtgtatgttcacagtagcagaaacttttaacactaaatgaactacaaaagtttgtaatattaatgacctttgttgaaaacatctcaattattaatcaaacgattttatcttaaaaagatttttaagattcggtgtggtggctcgtgcctgtaatcctagcactttttggggctgaggtgggaggattgcttgagcccaggagcttgaggccatccggggcaacgtggcgaaaccctgtctctacaacaaatttttaaaaattagctggatgcagtggcacacacctgtggtcccagttatgggggaggccgaggtgagaggatggcttgagtccaggaggtcaaagctacagtgaaccatgtttgtgtggagtgccactgcactccagcccaggtgacagagcaagaccgtgtcataaaaaataaaccacacaaaaaaagagaaagatctttatggattaaaaagataataataagtgtatttactgaatgccaattatttatccaacctggtgtatgcttagtgttttaggagaaagagaaaggcaatggaaaaataaattaaggtatcatccctgaaagaaacttttagaaagacacagtggctgaagtgataccttgttccttcagttgattctctcagaactggtgttctggtaaaattggactgttactcctgttattcagggagaagaactcaagtttgtatggcaacaagactagaaaatgactttctccctgccccagtgtattcgttcaggagctaatgtagataaaccgaggcaagaagaagctaaattttttttctgggcttataggttaaatgagtgatagatttagttggaggttttctcatttggtttcttttaatagatgaaattaattgtttcctatgaagcatgaaatgttttatatgaaactaaaaaaatgtggagtttgtacttgcatttcaagggtcactgctctgttataggccaagtgaacttatgtctggccttagagaatcttacatgtatttgcatctatcagtatataaacatgtgggccgtagaataaggagccagcagtaccagaacccagccttgttagaggccaccattttggtggttgagtggttattagtttacatggaagcatggagaataataggcaaatgtaggttttcagtgtcagtcgaactggcaaacaaaaatttctggtcatcttcagaatgaaaagttttcttgagtacctacatattttagcattttcatatgaagcagatacattataagttaattgttggaatctaattgtaatatggctgtaagttttttctttatatttgttattgccttgttcttatattatagggaaagagaaacaaacaaacaagcaaagaaactaatggtcatatatttgagagccaactcttggttgctgttcagttttattttcctgtaaacatatattttcccttatgaaatcttgggaatattagctctggagcactgctgaactcaagtacagacattttcatgtgtatcagtagattcccatcatgacatttttataataatgttgaagagcattttaaacaactggaattaagctcaaatacattaccagtggttgaagaattcacatcaataatcttctgaatttaggaataaaatggagaagtcaaggaaaggaaaatattatacacaggctagcaatagttaaaatacaattattaaagccagagctagacaaaattatggcaatgagatgtgtaacaaaaccactctgtaacttcatcatgttcgtttaaaagacctgaatgattccaaaatccttagaccaataaactatgtcttcttacttgataattaaaaaaaagaattataaaggcaaaaatgaaattatatgtatgtgtgtttgtgtgtgttccatgggaatacagctgttgtaaatcaaaggcctacttgcctgaccaagcagaataaaaatagtcattgattttaaagagactaaaagtgagggaagaaaaaagtcttctgcaaaagctctacagatggttgtcaaacttttcagaaaaatagacaaagcaacattttgaaaaggatttatatcttttatatattcaaataccatctgttatttaaaaaacatagcccacactgaatatctgatatagacaatataacgtttatgagataatagtttgagaatgacaataataatagtaagttttaaaagaggaaataagccgggcacagtggctcatgcctgtaatcccagcactttgggaggccgaggcgggtggatcacctgaggtcaggagttcaagaccagcctggccaacatgacaaaaccctgtctctacaaaacagtacaaaaattagccaggcttggtggcacacatccatagtcccaggtacttgggatgttgaggtgggagaattgcttgaacctgggaggcagagactgcagtgagccgagaccccacaactgcactccggcctgggcaacaatgagactctgtctctaaataaataaataaagaaggaaatagtaaatgtcattagtaagaagaatagcaaaatttcagttctagaaatacccagaattagctatatgatacaaaaaccctcatgaaacatttggataatcctcagaatacctatcaatataacaaaaactatgaattgacttcattttgaatgatgaatttttaacaaaaatagtcaatactttgggcttagtagctctagaagtgcttctttcttctttcttttaattaacagaatattgtcagaattttcaaatgttgatgattataagttgaattttccttttcattaacccctggggcttattttttgacttgatatgtttctctactcagaattaagatgtgaagagctttgggatagaatgcatcatacaagtgtgagagtcaagttccaatccataaagtacttctggtagacctggataaagatgaccttaagaaatgattttttttctctttgcagtttaaaaacaacagtagcaacaagaatgataaaacctatgaagccagctctgacaaaagatgttttttttataacacatactatgtatctactttttgatatttatctatcgagaagacttttctccttattgtttgctctgaaatttgtttatatttaataggaattttatagccttatccctgggtagaaattcagtttttttaaaagtagataattaaatcttaatttactattattttacacatggtgaaactagtcaataaatgtaatatcattgagctgaaggttaaaaaggaaaaaatatgactgcaagagtggttgtatttttgatttcagcatcacactcaattgcatcattgagtggttcattcttagtttcagtgttaatgaaatacatctgagtttttttccccagaagcttgaattgtgtcaccaaagtgtcattttgatttattgaaagttaagccctttccaaaattcaccataattttacatgtctcgaaagcaattttatacttcaagtctgtgctatagttctatatattttatgaagatttggatagatatctagccctgagttttttattgcctgttaaatacttataacccaaagtgtagcagcctcatgaactgctgctgggcacagatctgggagagtgcactcagagtgttggcccaggaagaggaaaagaggaaaaggggcagttcagtggcagcttggcttcctgtgaaacatgtcaccttaaccacttcctcattcttttagtggcaaactagacgaccttctccttcccctttcctgccgagtccccctctaatcaacactctagaaggcccctcttcctcctcagtcctgactccctgtcatttacttcaggttgcctccttgctcagttttggccccaggggtaggcaatctcctctttctggacatgtctcccaccagccccaagttcagatttcttggaagtttctgtgttgtctcgaggatgcatggttgtgtgagttattccagggctcaaggcctcttctgtgtctgtattccccaggaatccaggaattcacttctctgcctctcatcctcatcctcatcattaaaatgagcagatttgagctcaggaagtgcttgaataaatgaataaatgaacaaatgaaaggtgatttttgaaagtcttaattttaagaagtctctgagccctgttacagctcaattttcccataaactagaactgctctctaaggctgtgacatttctcctttttcctctcctcaaaatctacctgctgttctgatatctccctgacagccaccatagtgagattctatttccatttccaatctctcttttgtaagggacagagaaacagctagagaaatatggagccatgcgctctgaggactttagcaggcttcaactctatctgcaagtgagtttcacttagcgaatgaaattggaaacttaaagtgggtagggatgagggttcccggagaaggtgtaatacctcagtctgggaattgggagcatctacaaggaacacactcaattctgggaggttcctgtagatttcagagatttagcagggcttcccagcactctgcttcccaacctgtcattggaccagtaaaccctgctctcaaactgttgtggtgtccagcatgctttggcaaggtaatgaaagataacatgacatggacatatgggtgacatcctggagagatgacagaagcctctgtttaaggacaagatttgccatttagattttgcacccactgtataataagagccttaggattgggctggaatcgccctagcaggcatgatggcagcccctctggactggcaatatgcagcttttttgcaagtgttccatgtccaagtcaccccacccagctttctactgctcccgtggaagctctggtgaaacgcaaggaaagcagctgctgttgactggatttttctttcacatgaaactttgaagcctcatagatgcttattggcctggatgctattaaacctttaaaaatccctttctcatcttgagagtatttgagaaacatgtctggggcattttgcccaccctcctccaggttctgtgtcagtgagtgatatggtttgcctgtgtccccacccaaatttcatcttgaattcccatctgttgtaggagagacccatggcaggtagttgaatcatgggagcaggtctttcccatgttcctgtgatagtgagtaagtctcaagagatctgatggtgttaaaaaggggagtttttctgcacaagctcttcttctcttgtctgccaccatgtgagatgtgccttccaccttctgccatgattgtgaggcctccccagccacaatggaactgtaagtccattaagcctctttcttttgtaaattgcctactctgggatgtgtctttatgagcagtgtgaaaacagactaatacagtgagtctgggtcagtgtgtgtttatgttgaacgtagtggacttgtggtgtccccagggcaccctgtggggaatgttggcctgtggctttgctacttccagggggatttggcatggagaatgtgtgttttaagtaatagatagattatgattgaagtgtgttatgggctgagttgtctctcctcaaaaagacatgttaaagtcctaacccccagtatctcagaatctgaccttctttggaaatagtgcctttatataggtaatcaacttcaagtgaagtcattagcacaagccctaatccaataaggactggcattctaatgaaaggggaaatttagacatagaaacagacatgcacagaagaagatgatatgaagagacacaggaagaggacggtcatgtgactggagtgctgggtctgcaagctgagaaatgccaaggtttactggctaacatcggaaactagaaggggcaagagtggactctccccctcagagagagtatggccttgatttcagacttctagcctccagaactgtgaggcgtacatttctgttgtttttgaagccacctagtttttgatactttgtatgggagccctaggaaattaatacaaagtgtattaaaaatagaattttcttctattgtatttttgaggcaaaagaaataaggagctattgatttaaggaggaaggtttggctcatctagtatagacttggctaatcatttactcttgtatatttctcttctgcctgcccaagtagttcactgaacaggcttagaagttgatttataattgtaagagtttacacatcagaagttaatttataattgttaacagtttcatgcatctacctcataaataccttgtaaaagattttacccttcagaataatgttttcctctggtactttagtagtttatcctttttttgcatctttgatgcatttgaattcatcctggtatgctgtgtgagctggggctccaatgtcgttttcctacagatggctccacagttgtttcggtttcattcgaacagcctcctacagaagtatttttcagacttcttttatacttgacttccaagtttactactggttaagagcttttaaagtagggggaaagatatgacccattggcctactcgtttgattattttttccaattctgaaatcaaaaattaaaaaatttattcaaagttatagtttcacttaatttatattaactgcatagatagtgtgattcatctgtcctgcttggacatatttagtaacttttaattaatcttagagataaaagatagaaatctatgagacttgagacattcaaataagaccagtactgataagaggtaatcaggtgaagtgccatttggttgtaataggacatcaaaattgttccccaagagtgaaggatgttccattctcacttttcccatctgtcctcccaaattctttcactcttcctgatgctttgaaccaacttgaaaagttagtccactcagaacctcagctgttaaacttttagcctctgcaaacaaactagccgttttcctctttgtccctttaccatcaagctcagttgcttctcctactcctctcccttctgccaggggctccacccttgttcctcattcaacagtggaatcatctgtgtgcctgtctcctctttactgtgtaccattgggtcctcttcttcaccatctctaaatttatgcttcttccctgttccactgtcaccagcttggtctacatcctactttgatcatttggatttaggtcccaccctaatcgagtatgacttcatcttaacttgattgcatctgcaaagacctgatttccaaatacgaccacaagtaaaggttcaggtggacatgaatattaggagagacagcacttcaattaacagtttggcattaggactttattatctagcttagtaattgttttaacagataaataatagtatcccctaaagtttaaaatgcagaaccagattatgcctcagggtgcctaacctgagaggaagagtctttcttcaacagactctgggaaagacctttgtaaaaaggctggtgaccattctatttgatttctactttccaatattaactgcttaagtcagacaatctccttggcccacgctttcccctgccattctccccttcacataatgtcttcattttatttttcccttgttttattccctgaactcccttctctctattcagattccctgcccattttttctcctaatgagacgcctgacttcctacctcctttttgaaacttcaaactgcttagcaaatacaattttgaattgagtttgctgtcacagaacaaaaactagtccttggtccagagtatcttgcaggactgaatcaactgtggtctaagacacaataataactcttaattattttcttgtttccttcatggtatatttgttgctggatgatgagtttatattatggttgaatttcctttttgaaatgaaaagatgaatagtctttattggctgggtatctatttttatccagaagactttgcaaatgagaaatatttctacaatctgagtttaatttgcttaagcaatgaacttgttctttaaaagtcgtatatgtgcaaaataaatttaaattaaataaatcatattttaatgtagtcagggtagctttcatttaaataaaacctatgacaaatatccacgtgaagttatcactcctttaacaaaacaagtgttctccttttttattgaaatactagttttcacaaattgagattccttaatgtgatgaccgcttggactgactatagtatagctgcgttcttagaatggccctgaaaccacaaggcctctccaagatgcatgtggctgactttctgaggtgactgcattgaatctttctggcttagcttattctgcatccagatccctggaagctatttatccccaaacagtggtatatttagacccattgtgtgctaacctctctgtgccctaagtaccaacatagccaagccaaagttcgaactttgctgccttacaatggaggttacatcgtagtgatgaaagaggttaattttctttaggagttgaagaccagagaactgcaaaaaggggagaaaatcagtgtggcctctaatgagagctaagtgagtgaggcaatagaaaacagtgaggaccggccagtgcggtggctcatgcctgtaatcccaatactttggaaggctgaggtgggcggatcacgaggtcaagagatcaagatcatcctggccaacatggtgaaaccctgtctctactaaaaatacaaaaattagctgggtgtggtggtgggtacctgtagtcccagctactcgggaggctgagcggggagaatcgcttgaacccgggaggcagaggttgcagtgagtcgagattgcgccactgcactccagccggagtgagactccgtctaaaaaaaaaaaagaatacagtgaggaccttggagggaatcttacagtggagcagaattaaaagagaagaattcacctatttcctatataactccctctgtaaccgataactttctagagaaagctcactgaatatatttgaaatttgtttcataccacttttatgttattgccttctttcacaggaaccagagagctctaacctgtagatttgctttgttgtctttactttagactacagcctaaactgactgttgatttttggcacaattattacatctctcctttcaccccgcctctagccctttcttaattacccccattaggcatttttcttgctagcgtgaactaaatcccctgtctcaagcacgcgcctgtacattgaaatagaatgttaattcattgacgaaattaactgttcttgattgggaacccctagttccagggaatcttaaggtttcaattctgttgccttggttactaaactgttccatgcagtttgctcaactttgaatggatacttctcttaggaacattctcccttgtaagtaaattgcttgacgtgttaaaatctaagttctgttttacaattcttgagacaaattcaccatgatttagttttaaaaacaagtggccttgtccttttagtctaggatttatcacttagctgtatctagcaaagcccctcacacaatagtaggaaaaagcagaagtgtgattgctaaatgaaggggaaatgtaataaaatgatggaagtgcccttttttagggggaattaaagtttctctttgtagtgttacatgtattcattatgtgactttcataaatacaaaccccaataaaacggtgggcagttccgtctctggagatgttaagtgtctcttcatagaataacatggcacatcataacatttgattccttttacctggtcaagatgtttgcttatggcatttgaaatgcatattttcaaactaggtagatgaatggtttaaatataaaaattcattcaaggccctgagctatagaagaatatcttccaaaacatgcattcaagttctatctgtcagtgtttttctttttgcatcaataaggcagcaatggaatacaatcagatttattttttctttattgctgtctacaattcagagatataacctgaaaaatatgttgtctcttcccaagtagatcttgtaattctctgaactgtgatccagaccaatgccgcctttacattgggtctgtggaagtgggagggtccactgaacctggttatgagaggtttcaaattgaaaagatttacaagtatgtaaataaaatcaaatagtcaattagtatctaacatatacatgtcaaaacacatagccccaatctcataaaatcaaagagatctacctaaatagatttgtttgcctaacaaatagcaagaccactttgacagaatctttagcatgacagtgattgtcaaaatgggtaaatggttattattgcccagttaagtaatttctgatttgctttgccttgattactcttaataaactaaacttaacataccatagaagcaatattttttaaaaagagggtatattctagagctagatagggtgttgtgcaacaatgtgaatgtacttactaccattaaactgcatacataaaaagggttgaaatggtaaattttatgttatatacattttaccaaaataaagaaaagttataatactttccgtagcatatataaaaaagaaacagacatttcatagcaaaaataggataaaaatgatattaaattcataggggatttctcttatctaaaactttagatttgattcttagataagaatataaacacattgcaagaagataaatcaataagccaatgaagtaaggtggaataaataaatagaaataggtgatacttgcggctctgacagcatctgataataatagtacaaacagtttcatttcatttaacagttatttgatgaactcctgtgtgctaggaactgttatttaaaaaaagtaacttttattttaggttcaggggtacatgtgcaagtttgttatataggtaaactcatggctcggggcttggtacacagattattttgtcacccaggtactaagcatagtacccaacagtatttttttttccgaacctctcctcctctcaccctccctcacgtaggcccagtgtctgttgctcccctctttttgtccatgtgttctcattatttagctcctacttataagtgagaatatgcattatcaggttttctgcttctgtgtcagtttgctaaggataatggtctccaattccatccatgttcctgaaaaggacatgatctctttctttgtttttatggctgcagtgtattccatggtgtatatgtaccacattttcttcatccagtctaccattggtggacatttaggttgattccatgtctttactattgtgaatagtgctgtaatgaacatacgcgttcatgtgtctttatggtagaacgatatataatcctttgagtatatacccagtagtgggattccttggttgaatggtagttctgtttttagttcttttagttctgtgtgtgaaaacacaccagagaacaaaattgaccagatctctgccttcacagaacgttcattctactgtaccagttatttcatgaggaatatgaatactgttattactctctgcccatttcacacatgaaggagcagaaatggagcagagtttactaatttatctgttgcagatagtagctaattgtgtgccaggtgctgttccaagcattttacccctgttaactcagctgagtgcttttattttccccattgtatgcccaacttatggatgacagcactgaggtagagaaaggttaataacatagaatagtttagtattagggaaacaatttgaattctaggacacttttactgaaacttagcataggctaaagaagtgatcgtgcatgtttaaagagttgtatcattttatcattatttgactttcttttccaaaaaaaacaacccttctcctttctctctcttccatgtgacaaatacatgtctgtatacatacatatatatgtaaatataaatatatataaaaatatatataaatataaataaatatatatatatatatataaatatatatatatatataaaatttttttttttgagatggagtctcactctgttgcccaggctggagtgcagtggcatgatctcggctcactgtaagctccgcctcctgggttcatgccattcttctgcctcagcctcccgagtagctgggactacaggtgcccgccaccacgcccggctaattttttgtattttttagtagagatgggctttcactgtgttagccaggatggtctcgatctcctgacctcgtgatccgcccacctcggcctcccaaagtgctgggattacaggtgtgaaccaccacgtgcgacccacatgtctgtatattacagccgttgaaggacacaacttttgccattgggcgacccagtcccctagtaagtgttcaaaaatattcgctattatcattgttggtgatttcgaggatttggatataattaatttgagcctaattttttaagactattacataactatacaaaaaaatcatgagagagcctggaattttgcaaaactaggatagaaaccagtttctaaaaagcattttaaacattcagcttgtgtatttcttttcacttgtattttgtgatctgcctccatgctttcatgcctttctcttcaaacaatcttattaccactaaccaaaaacaattaaaatttgattgttttgtttttacatgttgttacagttaagaaaaaaaaattctaggtattgacccctgccagttttcggagttaatactaactagtgatttggggctacatttaagtgctttaagctatcctacaagcttaaagtagttatacatgcaaatacttaaatgaattaggtacaagaatacagaggtaagaaatagaatctattgtagaataaatcctatttcagatgtgactgttttaggatttgaatcaaccacatattacagaaaaccccaagataaagccttggcataaccaagacaaagtttatttttttctctcacataaaattagtccagacttattttaccagtggtatggcaactccacagtcaaagggacccaagctcatctgaccttcgattcccttatcctgggacaggcttacattctcaaggtcgactcctggcctaatggggctactggagcttcagccatcacactctgtgcttcctgttatatctactggtcagaacttcagatacatctgtctaaaaggaacgctgaaaatacagtctttaagctgtgcaattgtacctggaataaatgagttcttttaataaaaagagttgaatggatatttggtgggcaaatagcagtccatgctacaataataaacttcacaattttagaattagatatcttgtaatgaatattctgacgtggtgtcaacttataccatagatagattataactttgaaaaggaattagaacacaataataataaattcacactaaggctcttttggggaaaaaaaatctctaccatttattgagtgtttattatcttcacaacatccctatgagttagggattatttttgtggacattttacagataaagaaacagaggcattgagatgataactagcttgactaaggagtggcggagctctgggcagtgtggttcctgtgtgcccataaggccattgcacaatgctgcttcatcatgtaattcagaaagtattgcaggatgtggcagttggtcatcatgaatgttcattgttatcttgtggctttgtgaaaaattctggtcattcaaacgatttgactgttgagattctgtgcacatgagattgtactgtgtacatgtttctaaaaatgtgtgttatagatcaaaatgcacacactcatttacctctaagaacagttcttatattgaagggaaattatctgtacgtgagagaacaacgtggttttgagtacaagtggtgaacagacattgaatagttgttttcagaaagcatcactcccctgtacctcagaacccagcctcagtgctggttgcgagccaacagctttgatgtcctgaagtttttgcatcacttctcttttgcccctctttgggattcaaagatgataagtttgaagtggagttctaccgcttccattggaagagaaaaagtttccgtgtgtgtgtgtgtgtgtgtgcgtgtgtgtgtttacggagaggagttctatgcatctgcagagggtgctgccatcaacaaggagaacagagtgggatgaagggtttgggaagccaggatgggcatctctgacgagctccagaactctccacctaagtgtgcaagtgtaaacactccctgatgtgtgaactggccatctcaagactaagtatttagcaggaaatgccccctattcaacccttgccttctcaggtgtagaggttgggttgtctcttccatctttgtttgaattatgtcattaatcaaccttagtgaaagatcacttagtcatttgtgacagcataagttcttaattgttaggaatcactggtgcggcacacatctttttctatccatgaacaacgtcaaatgcttattttctcatgagcttttattttttccttttaaaaaaagtttcttaggataaacacagcctttttccttgtctctcccttgccctctcatctttttctcaatctttatattcctatatgtcactgaagagtccccgtgccaacgctgtgcagtgggaggctcctacctccaccagcttttgaggaggttgtagtcctgcaaccttagaggttccacagccaagctgggggtctttctggagcatgggtggtgaatctgagatctatgcacccaggaagcctgacacattattgtggtgtctcaattcttttttttttaattagaaaaattgtatcaaattgcatttggtgagagcaaaaataaactgaagttggttgagctttggaagactacaagccactgtaatatttaagatttcttgacctccagaactaacatttgtcctgtcagagaaaataattactcctgttgagaatacatgcattaaagtaagatgttcactactctatatgatcaccaaacattaaataatatgttttacacatgtatgtactatgtgttcaagtgtttataaatccatggagccaatagaatgtaagttctatgagggcagaaattttaatccattttgttcctagaacagttcctgacacatactggtgttaggggtaggtcttcagattttatggatcaaatggaatctccacacttaaaaaaacttagagaaaaactgccttaatgtgcccatagtctggttggaaatggcagctccaggttcattgattgctttgttcattcggcacttttcactggacatgctatgagcccagcagtgttctgggtttttgggatacaccaagccctgcctccccggtgcttaacattctagtgggggagacagaaagaaagcaaacatggtggacaacttaattatctatttttgaaagttgacaggaactgtggacaaaagaaaacaagagctggagacagcagtgccagggcagggtgagggtcaagttagagtaagcctcattgagagatcttttgagcaacacctgaaggaggaggtgagaaagttagccatgtggagggagcagcattccaggcaagtggcccaccaagtgcagagtcctgacagcaagagcagttctggaatattctagaaacaggaagaagaccaatgtgactagagcagagtgaggcaggagtgagagaaaatgtgatcaggaaagtaaggtcctgtggccactaagattttggcttttattctgaaggaaatgaggactcattgcaggactttgagagcatgatctgacttgtcacaagtgttctctttgtctactgggttgagaagacatccaaagggggccaaagattgaggcagggagagcagctaggacaggctctagcaatctaggtgataaatgaggaccgatggtggctctgacaagggtggtaatggagacatggtgaggagtgaccacatttcaaatatatcttgaggtagagctgacaggattttcccgatgggctgggcgtagtatgtgagagaaagaattcagttatggatgattattttgtcctgaacaatgataaaagttgagtcaacaactgatatggggaagtctacaggtggaacaagtttttgaggaggaaatcagttcagtgttggctatgttgaatttgagatgtttttagaccatctgagtggagaaatctggagtttaggagagaggctggacttgatatgatgttatgggtcctcagcatagagatgatgaatgagattagcaaagtagtgagtgtaaaaaggaaagggaaggagaccaaagattgagccttgggacagtcagaaagaagagagggaacccgcaaaggagattgaaatggaatccatctcactgtggcatcgtgaaagacaaatgaagatggtataagatgaaaaagtgatcagctgtatcaaatgctgctattgggtcaagtagggtgagaattgataattttccatcttgtcaagagcagccgtgatagagggagggggtggagatatacttggaatgagttcatgaaaaaatgggagggaagggattagaagcagcaagtataagcagctctttcaaaggagggagatggggaatggctactgggatgccatcacatagataggaaggtggaaccctgtgcactggaggagggagtgtcctcacagaggaggacaggcaggaaggtagagtgggctgctttgggcacatgtggttctgtggatgttctcttttgacagcttcagttcttcagggaattgggagcaagttcatcagctgagagtgaacatggggcagacagtgtgagaggtcaaagcggcaagagtagttgtgccacagtcttttaggagagagggaaagtaaatggaatggggaaggaaagtaaatagcatggctgctgagctgcgttacaagcccacccggtgttgggttgtgaggtgtagttgtgggctcttcttcagtcggattgtcagcatgggcggctggcagagagttgaatctgacagggcagcagttctggaaaatgagtatgatgagtcaagaaagggaccaggaagtggaaactgtgtgtgaggcagtgatgctgatgaatgactgtggaaaacaatggaggtgaggagggagtggatgttgagtggctaggggacagtgaaaagggagtaggatccactagcttgctgcttgtctcttataattaggatcaagagcttctgccgtcttctaggcattctgctgcttcaagggagtctctgagattgggttctgcatggatgtattgaaacatgcacctaggtgtgtttggagtcctgccagagacctgctttctctttattcttatcctgaggccctttaggaggctcagatggaataatttttatggtttcttaaaacccaagtgggttacctaagccatcatagttctgccccctgttccctgagaggaccacgggagcaccctgaaatgggttttccactctgccatcccccacttgcctgcttgggtgttgacctcagccatctacacatatcccggatgtagtgttgggcccctggttgatgtcattccttttcaaatgggatcttttactacagcaatccagcaacaaactaaatagcgatagagttttctttcccttacaaaccacaaccacaaccaagggaaaaaccaaaccaaaccaaccaaacaaacaaaacaaaagtatgtggcttcttaccacagccccctatctcgcccaagccttgtggctctttgatctctggtgttctgaaattgcgtaatcatgtgcttgctctttttcattcattgtgctgggcacacacttaatggaccctttcaagttggttttcttttatggggtaagggtaggcaggactattttttaagatttcttccactttgtcttccaattgttctaatgagttttttaaaattgtgcctgtcctgtttttaaattccaagagatattctttgtcctctaaatgtttcttataaatatatataaaatgaataatataagcatatagttttgcatagatttgagttcgctgttacagtgtccttttatttctctgaggatattcattataggttttttaaaaaacactttttctggtccccaaattatctcttctctctagacttcctccattcatgccttccttcccccctccctcccttcctttgctcttgctcttgattttggaggcttgtcataaatatttgaccatccattcattttttaaccataacgaactaaaaatgttaattggagccctgtgtgttccttgagcagaatgtttggattaatgagcttccgtgcaatgttttctctggaatggattaatttctccagatctataatttttcaatctctttccagggggtaaaagcctggttgtctgtttcatgaaagtaaaaatgtgggtaagagtgatcccagcattcagaatgcagacttagtagctgcttgttttcagtcctgggacttcacccaccctcaccacagttggtatcccaaagtgtgaaactccttagattatctttctcaagaaaatgaaactcagatattcgtgtcctttggccatttttgattagcttatttgttttcttccttttgaattgtttgaattccttatgtattttgaatattaaccccttattagatttatggtttgcaaatattttcccccactctgtgggttatcttttcactttgtcaattgtttactttgctgtgcggaaagctttttagtttcatgctatcaaactaattttgcttttgttgcctgtgcattcaaggttgtatccaaagaactcattgcccagatcaatgtcatggagcatttctcctatgttttcttctggtatttatatagtttcagtgcttttctttaaattttaatccattttgaatggatttttaatagggcataagtgtcacttccatttttttatatgtggatatccagttttcccaacaccatttattaaagaggctgtcctttccctattgtgtattcttggcacttttgttgtaaataagttgatcttacttgtgcgggtttatttctgggccttctaatctgttccattaattcatgtgtctgtttttatgccagtatcacactgctttgattacaatagctttataatatatcttgaaatcagagagtttgatgcctctagctttgttctttttgctcaagattgttttggttaattggggtcttttgtggttccatacagatttaaagattattttttctatttctgtgaaaaatggcattggaaatttgataggaagtgcattgaatctgcagatcactttggatagcatagattttttttaacaataataatttttccactccatgaagaggtatacttttttcatttatttttgttttcttctatttcttttatctgtgttctgtagtttttagtattcaggtgtttcacctccttggttgaatttaccccaagtattttgctgttgttgctattgtaaatggaattgttttcttaatttcctttttggataattctttattattatatagaaaagctatggatttttgcatgtttattttgtatgcttcaactttactgcatttgtttatcaggttttaacagttttttgataaaagttttggtgttttctgtatatatgatgatgtcatcagcaaacagagacaatttcatttccctattttctttctttttttttttttgagatggagtctcactctgtcacccaggttggagtgcagtggtgcgatctccactcactgcaagctctgcctcctgggttcacaccattctcctacctcagcctcccgtgtagctggggctacaggtgcccgccaccacgcccagctaatttttttgtatttttagtacagacggagtttcactgtgttagccaggatggtctcgatctcctgacctcgtgatccacccgcctcagccttccaaagtgctgggattacaggcatgagccaccgcgcccggcccctattttcttaatcacgcgatatatacaggcttgttgaaaaacatgaaaatgataaagaagtttatgtattaagaggcaaaagctatgatgttcaactcctctaaaaccacttcttagtaggtgaacattgttaaacagttttgtgaatctgcttccagattttttctaggcatgttcatacacatatacacacataatttatttttacccagttgcgatcatgtatcatctgatccaaaactcgctatttttcagttaatatgcagtgactgtctttccaaaccatagtatatatatatatctctaagaatttttcaaatctgctatagtttttaaacatatttattgttacatacatatgtgtataagttacttatttgcttatttctttgaatatctttgtctagctttggaatcacataaataatgagtacaaatggtaaagaaatttcatgtggaaggatatatagaaaaagtacaagtctctcttctcatccactctatctcattacctaaaaggttatccttagagctttatataatacatccctgaagtttagatcattttattgcctcccaattgttgagagtaaggaatttagtacatatacctttcctttcactttcctaccctctacctacttaatgagttcgattatagtttttcagttcacccactgttaaataatatacctatatttataatatacctatataatatacctataataaacctatatttttgacttatcaactttggacatatctattggtgacttgtgatgagagatgaaataatttgtacatttacccttcttttccattcttttcccctacccattctcccctttttggctaaatgattgcttttaggttgataaggtttataatagctactgttctgtggttataaaatttgtttcatattttatgtgaaatttgattatacaactagcattcaaaacattattatgtaaatattagttactgtaatcacacagtgacgctcaaggaggtatttactaagcatacagatcattccttctggatccaactcagcagttgctttgctgtgccttacctcatctttcgtggattccttttcttttgattgcaatatatccttgagtaatttttcagaatcgatatgtactgtctgaactctcttatacccaaaaaatttgctttcacatttgctaatagtttgacagagtatcaaattctgctttcaaattctttccccttcatggctttgaagatactgccccactatatattctaaaatccattgctgctaatgagaaattctggtgtcactctgactcttatttctttcatatcacttggcattttcttccgagaaaatattacttatcttcagaatgatgaaccttctctatcatgtctctaggtgttagggcttctttcatttaatcctgtaggtcctcaataggctttttaattaaagtctcattttattcgggctctgtgaaattttttgttatgttttggcttctttttctcttttgttgtctctcttttctccttgaatgtctttctgatagatatagcattcccattatctatcatgtctttcagattatcctacatttttctctttgttttctttttctaccatgtttagaattctcttacacgtaagacatcacttactagatcttcagtcatatcctttttattattcagtctgtgcatttttaattttcaattttggcaaccacatttttaatttctaagaatctattttgctaatagtacttttgtcctgaaactttttatatcctgcaatatttagaaagagcacacccttatccacagctgattaggagtacactctgaatgcagggcacgatgggcgaacattttgttactggcctcctcaagcctcaatgcccagaagttattgcctccatcagaaacccttcttttgttctatccctcacttccaaatgaagttccagcttaatttttgctgtcactgtagtgggacaagcaaatccctatttcacgtgatcattgctcaaacctctattgacaatcctgctttgcattcccttatttagagtgggatggaaaataaaggctatgaagggggaagaatctgatcccaccattctcctttttcattgcagttttctccttttttatggatgcaataagctgttgcaatctctcaggatggaaaagaacattttaaaactactctactgccagaatgatctcttttttttaattatactgtaagttctgggatacatgtgcagaacatgcaggtttgttacataggtatatacgtgccatggtggtttgctgcacccaccaacccatcatttacattaggtatttctcctaaatgctatccttcgcctagcccctcaccccttgacaggtcccagtgtgtgatgtttccctccctgtgtccatgtgttctcattattcaactcccccttatgagtgagaacatgtggtgtttggttttctcttcctgagttagtttgctgagaatgatggtttccaacttcatccatgtccctgcaaaggacatgagctcatccttttttatagctgcatagtattccattgtgtatatgtgccacattttctttatccagtctgtcattgatgggcatttgggttggttccaagtctttgctattgtgaatagtgccacaataaacatacgtgttcatgtgtctttatagtagaatgatttataatcctttgggtatatacccagtaatgggattgctgggtcaaatggtatttctggttctagatccttgaagaatcaccacgctgtcttccacaatggttgactaatttacactcccaccaacagtgtaaaggcattcctatttctccacatcctctccagcatctgttgtttcctgactttttaatgattgccattctaactggcataagatggtatgtcgttctggttttgatttgcatttctctaatgatcagggatgatcagctttttttcatatgtttgttggcctcacaaatgtcttcttttgagaagtgtctgttcatatccttcgcccactttttgatggggttgtttttttttcttgtaaatttgtttaagtaccaaaaacagatacatagactgatggaacagaacagaggcctcagaaataacaccacacacctacaaccatctgatctttgacaaaccggacaaaaacaagaaatggggaaaggattccctatttaataaatggtgttgggaaaactgactagccatatgcagaaaactgaaactggaccccttccttacaccttacacaaaaattaactcaagatggattaaagacttaaatgtaagacctaaaaccataaaaaccctagaagaaaacctaggcagtacaattcaggacacaggcatgggcaaatacttcatgactaaaataccaaaaagcaatggcaacaaaagtcaaaattgacaaatgggatctaattaaactaaagagcttttgcacagcaaaagaaaccatcatcagggtgaacaggcaacctacagaatgggagaaaatttttgcaatctatccgtctgacaaatggctaatatccagaatgatctctattttattttttatgacatattaatcatgtttgttctcttgtgtcctctctttctttctctcgattttccagtggtccatggtggtctatttgtagggttcatatttacaaatgggagtcaaggtgactccactacagttatgtgaaaaagtttccctgccatgcctctccctacactgggcgagctgatctggttccgggtcagtggatggagcatttcctctcgcaggcacaccttcaggctggtgggagcaacttgggccatggactggaaccatgtcaatggagaagacttcctctgtgccaggtcctggtcagagctgccgtcttgatttatttgtatccctctttccgtctgtggtaaagatctggaggttcttaagctctctctggcctcaaaacccacagcaggaaatttcctcactcagatcacccacatttttagcaagcagagcttcagttttgagtggagggcaggagtattgggcagtagggaaggacacagttctctacgccgttctgaatgcagtgcattaataaactctcttcacagttgctccagggtgctttgcattggtgaacttctggcttccaggaagaacctggttacctctgatgtgttgggttgttgttccatctactctaaattctgtgccaatccatcccatctgtttcctaccattggtttatttttaaaaaatattttatatttatgtagatttatgaacttgattattataccatcattagagtttgggtccagagtcaaacttctataaacctgtaatcaaaaattggcctttattttcatgtagaaggaagtagcagaccaaaatggagttctatattccatttttctaaatgagccattgagatgtagagcaagcaagtgcccttttgagggaatgtgtgtgtgtgtgtgcacacatgcaagggcattttcccatgtctcccatcctttaattattccagtagacagtgggccagcagcaggtggtggcataacttctccatttgcagtgctgtggctgtggtgggatctgaacaggaggcaaccttggcaacagtaggaatagaatgtggagtcagcaggaagcgcttttccctcccacttacctgtcttcttgtagcagacagcagtgcgggcagcttcggctgacttgcttagcctgtttccattgtgagcataaacaccttagacgttttttcatttcaggacactggagcttgatgaaattaaactacactcattgtctcaggcaaatctcctaatcctattctgtgcttttgttgttgttgttgttgttgttagtggtgtgtttctctctccacttcgctttccttttaaaacacaacaaatttttttttttaattttaaatgaacttattcattgcctccctatgtgtcccctcctttctagtgatattgccgctgttcattcccagctgttcttgattcttgtacaagactctttgctgggcttctgccttctagacgcttcaccttcccgttatttcttccctctgcccccggaaaggcccttaccatggctctgatgatgatgacagctgacccttttccaaggtggaatccacgtttgattctctgatcttgtactggcttagcacagtgctcggcattcagtaaataaggttaaggaaggccagtgatatagagtagtagaaaacagcagttaatgaaggcttgctttctgtcacaggttcctctcctccaggactgcagcatctctgtctttctgtcgtagcatacaagacagcatctctgtctttctattgcaacttccaggtgagaagccctcccacaagcatatacaaattttatggaaacagacaaaaatttgtagggaagcaaatcccttcaaggttgagtctttctggtcttctagaaggtaagcttggtgatggggcagtcacagccctagtgcttatggaacttggccctttggggacagatctcagttaactaaagaaatgctatggcacagagtaccttgaatctcctctaatttatgctgtacagggaattattcacactttattgttaataacacattacatgggggaacaccagacagctgaccaggactcctgtgcttgaaagcttctgctcttcagcagggcagccagcctcttctcggtttagcacagagcttttattctcctcgctctctctaaactcctgttcaagacagtttccaattctgttgaattcactcatttacctcatctgtgcctttccccacctcattctctccccttcagagtgcccatttctgtgtttcaaatcccacaaggccaagcttagatgctattatgtctatgacattctccacctctatcccaataaaaacctttgatttcatcttgctgtttgtatctttactctgttatatttcacccataccagagttgtttgtggacatgcctgatttccttcaggctgtaggcatatttgattcatttttgtactccatgagtgcctaacatagcatcttatacaccatagataattaatagatgcctcttggctgcatttgtattaaatttttaccatgtacttgtcctagctagcagagacttggggggaaataatgatgactgatttttacttatttatttattttttattcccacaggtttttgaggaacaggtgatgtttggttacatgaataagttctttagtggtgatttctgagattttggtgcatccatcacacgagcggtgtacactgtatctagtttgtaatttttttatccctcactcctttccctccctttctcccgagtccccaaagtccattgtatcattcttatgcctttacatacccatagcttagctcccacttatgagtgagaatatatgatgtatggtttttcattcccgagttacttcactttgaatagtggtctccaattccatccagaaccctcaaaaccatgcaaaaccgtggaaacaaaatagcctgctcctgaatgatcattaagtcaacaatgaaatcaagagagaaatttaaaaattctttgagctgaatgataatagcgatacaacttaccaaaacctctgggatacagcaaaagcagtgtcaagaggaaagttcatagcattaaatacctacatcaaaaagtctgaaagagcacaaataggcaatctaaggtcacacctcagagaactagggaaacaagaacaaatcaaacccaaacccagcagaaggaaagaaataacgaagatcagagcagaactaaatgaaattgaaacaaacaacaacaataaaaaagataaatgaaacaaaaggctgtttttttgaaaagataaataaaatggatataacactagtgagattaaccaggaagagagaggatccaaataagctcaattagaaacgaaacaggagctattataatcaataccacagaaatacaaaagatattggaagctactatgaacatctttacacacataaactagaaaacttaaaggagatggataaattcctggaaatatacaaccctcctaggttaagccagaaagaattagaaactctaaacagaccaatagcaagcagcgagattgaaatgataataaaaaaaattgccaacaaaaaaagtccaggaccacacagattcacagctaaattgtatcagacattcaaagaaaaattgataccaatcctactgaaactattccacaagacagagaaagagggaatcctccctaaatcattttatgaagccagtatcaccctaataccaaaaccaggaaaggacataacaaaaaagaaaactacagcccaatatccctgataaatatagatgcaaaaatccttaacaaaatactagctaagtgaatccaacagcatatcagaaagataatcaactatgatcaggtgggtttcataccagggatgcagggatggtttaacattcacaagtcaataaatgtgatacaccacatgaatagaattaaaaacaaaaatcacatgagcatctcaatagatgcagaaaaagcatttgacaaaacctagcatccaattatgacaatttttaaatatggggaatggtcttcatggaaaagtagatgttaatggcacctgtattagggttctctagagggacagaactaataggatagatgtatatataaaggggagtttattaagaagtattgactcacacgatcacaaggttgggttccgcaataggccgtctgcaagctgaagagcaaggaagccagtccaagtcccaaaacctcaaaagcagggaagccaaaagtgcagccttcagtctgtggttgaaggtataagagtcccaaagctgaagaacttcacgtcagaaattcgagggcaggaagcatccagcatgggagaaagatgtaggccagaagactaaaccagtctagtctttccatgttcttctgcctgcttttattctggccatgctggcagctgattagatggtgcccacccagattgagggcgggtctgcctttcccagctcactgactcaaatgttaatctcctttggcaacatcctcacagatacacccaggagcaatactttgcatccttcaatccaatcaagttgacattacatattaatcatcacagcaaccaaaagattatctcatttaatccttacaatagctctgtgtagtgggtatatattttccttttgctgaagaggaagtaggcttagaggggttgagtaatttgcccagaatacctaggtagtagaagatagtagagccattatattctgtctgcattcaagagtgtgctgctttatttgttcctgaattgcacacaagctaaagaatacaactggatgttcagtctactcctattttgataacttggctaactttactgcagagtctgcagaggtgaccaattttactctgggagataccagggaatccgccatgtaattcctcaggctgagtgttttggaaacacaaagctgtcactgctattaagtgatgttttttcctgagagtctactatgctcccagtaccagcctccgcaggccctctgtctaccccttttctgtcctgatgtgttctagcaggcactgagaaagtcattgtagaagttaccatgactttccaaatgcttccagaagcagaacacaatttcacaggagggccaataagtatgaatgccaccttgatagaaagtgaagttttgcgtcctgttgaacactcagtaaatgcttcctgaatagatgcaggattggcaaaacatagctccccagctttcataattcagactcagaggcccttcgtgctcctgttattcttgttacttcatgtcaggtacctaaaagggttgtttttcagttttcgtcattgatttaaagcagaggttagtaaactttttctgtaaaggccaggtagttagtattttagcctttgtgagtatttggtctcacaaaagcagccatagatgatatgtaaatgaatgtgcatggctgtgttctgataaaactttatttaaaaatgaggggtcatctgggctgtggtttttcaacccctgatttaaaacaaaaacaaaatgtgctatgcctgttagatgctactacatttgattctgtgttttccatatttttctaaaatgtactgaacaggaaatgaacaaactgatgacacaatgatctaatttaatcattgagataagagtggcgccaactcttattgagtatttgttatgtgtcaggcacttggctaagcactttacatgttttctatgatttataaagcaaatattgttattatcttcattttttgctgagggaaggaataaagtcacagccagcttacagaggctgccggaggtcacacatcaccagtacactgaaacacgtggtctgattacaggatccatgatctcctgtacagatcatagtgatattgacctgagaggaaagagcctaggacttacaatcagaaatctgggttcacatttcaactccgttccatgccaaattacattaaaactgggcctcagctttcccacctgtgaaagaggaataatactaggacttgccctcccaaccttagagattgctgtgaggataaaagcctatatgaatgtgctttataaactataaacaccatacaaatgtttgttataagtctgccatttgaatacatcttagtctttttttcctatgtgaaataaaacattttaagacaagcaatgaaattcttgaaactataacaggtttttaagggtgttgatccccaaagccgtcttcactattttgctccctctctgactcgctctgtctctgcctagcagcgctagtcttttctacgtgtttgatctgttgttcctgtgtttaggcccatccctactacacagcggaagtcagctattttttctctttcctttgctctgctgagcaagattaaactcttttcacctggacttttcctagattactcaggctgggtggaaatggggtagctgtgaggctgggatgttactgtacaattcaaatttatgatctgaacttaactagatcttgctgaagattgacctggctagcacagttttgaggcacctatctttcagtcccttctgtcctcttggcctggccactggccacatgttagtagcttacttctaaggatggaatgccatgcatctcctacaaggttgtctctatgcttcacacaaagtaaaagaatggaggcaactttgaatgctgctcattttcactcaggcaatccctttacaatattgtgcttagtaaactccccccactctttttttcccttagcttgttttttttttctaataaaagtctatatcaatttgatgtattagttagggttctctggagaaacagaaccagtaggatcaattgattggtcaatcaatcaatcaagacaaaaagagattcatctggaaggagttgattcatgccattgcggtcattggctagtctgaaatctgtaaggcaggctggctgactggaagctcaggcgggatttctctgctgcagtctcaaggcagaattccgtcctcttggggaaacctcagtctttgctcttaaagctttcaattgattggatgaggcctacacacattatggagaataatctgttttacttaaagtctactgattgtaaacattaattatatttaaaaagtactttcacagcaacatttagactagtgtttgaccaacaactgggcaccacggtcaagccaagttggcatatagaattagccagcaaacttggtattcacaatctgtcattatagtcttatctataaacctaaggtttagagaaacgctggtcattctgaacaattccctgtgaatgcagagatcaaggagcctccccttaactgggtaggcagtgtgaaatacctgcagtgtacttgaccttactgttcacccactggcagctgttcctacagcttggcttcagatatataatattacattggctaacttcaaagagcattgttttccaaggatagagatggtgatggtgtatattacttttaccagccccagacctgtaagaggttctcatctcttttgtttaagattttgttgtttttttttaatgctcaataaaagaagctttattctttcattaaaaaacaaatctcagaagaacagggaagaagagggtagcctatgaaagtgtgattgttatttgataccatcgtgacttagcttgttttcacctaagactctgagattctattctgtttatgtgagatttgggctgagttcaactactatccatattaactgaatcataaaacaattaatccatcatctggttacattttggtggggagggagcatttaacacaacactaagccacatatttcactattttttttttttgcagcaaattgacttaactgcttgctttcacaccatgcctataaaacctttttggttttagaggttctatgtgtctggaaagtacagtgaagtatctcatcagaatagtattaatatttcttatgacatttcatatgtcctgatatgggttaatggagaaatatcataagagtagtaattctcttgctgttattatttgtcctatttagacaaacagaacatagaattaataagaattcaaaaactttaatcactgatagagattaaatgatgtttatattagtcatcatcacctaatatcttaaatatttaaccttttatgcagtgtttgcctctctacttgggtatgcccttaacagtaaaaagtgttgataatgctctcccttttggcactcacagaattgctatacatatatatgtataaaatatatgtaaatataaaaatacatagttaaaaaaataaatctaccactaaatatagtaagggagttttaaactgaggtttttgaagtctttaagaatttatttagagacttcttttgttggaagtatggtggctagatgccatgaaaaacccactgaaaacaagtgtaagtgctaggtaatatgttgaaacatatcttttgaaatgtattactgagctggcaagaaagtatgccattgtagagagtgaaaataagtgaaggcagaatcctgggaggtaagccagcctgaagatattgatgacactggatggccttaagtttccattttgactggcatgtaatccagccaaagattcccacagaaatccgaggttccaaatggtaaatccgtggtgacattggggtgaccgagaaatgaactctgtgcagaaaggaatggtaacaacacttgtctcgtacaactttggctctgggtaggggaaaggaaaacagcttcctagagaaatgttaaccacaagctagccctcatgagagatttcagctaggatggatgctatctgtgtagtgcaaaaaaaaaaaaaaaaaatccatagccagattttgtgctttaatgtggacctaggtcaatagtgactgcaaagccagaagcagtggctcacccctgtaatcccagcactttgggaggccgaaggaggtggatcgcttgaggtcaggagttcgagaccagcctggccaacatggtgaaaccctatatctactaaaaatacaaaaatgagcctagagtggtggtgggtgcctgtattcccagctacttgggaggctgaggcacaagaattgcttgaacccaggaggcggaggttgcagtgagccaaaatcgcaccactgcattctagcctgggcaacagagtgagacaccatctcaaaaataataataataaaaaaaagtgactgcaggggactgggaagaggaaacacaaatctttactggggaatggaatttcaagtgtatgcaccaacccttagaaatcacaaaacatctgacccttctgaaaataaccaccatgagtgagacagcaggaaaaaaaaaaagaaaaaaaaaaaaaaaacaaggaaagagagggacaatagaatcagactcatacctacaaaacttaaaaattaaataaaatgaatcagactcagaggcttcagagtttgatttaaatacattatacaaaagttctgtgtgaaatatgtttaagatgtagaagggtgcttgaaatgcacaaagtcaacagctgaaaaattgaccaagcagatatgaaaataaaatccaatagagggcatctggaaataaaaaagtataataattatagtgaaaaaagttattagatgggttaattagtagaatggatatagcagaagaaagatttagtcaactgaaaaatatatccaaagaataggtccagaattaagcttagggagataaagagatggtcaatacgaacattaggagacatggagaacagtgtacgaaggtgtaataaattctaactggagttaaagaggagatagtaaagaggaagaaaaaacacaaaactcaaaaaatgtagtggctgagaatcttccagaagtattgaaagacaccaatccacagattcagaaacctacaatttgcaagaaaaagtaaaaagaatttcacaccaagatccatcttcatggactggcagagcataagagatgaagagcttatcttgaaaatgcagccagagagaaaaggtctatcgcagttaaaggaagaggcaagcagatgactgagttctcaatgccaactgaaaatgagaagccagtggcacaccttcaatatgttgggagaatataattttcaacttaaaatagtgtacattgtaaaattacatttcaaaaaaagagggtagtataatgacattatcaaataaaaaccatcccttataacaaatatcactaaagaaactgttggaggatgtagtttaggtttctagaaaggatgtctgatatgcaagaaagaatggtaagtcaaatattgagaaatatgtgaggaaatagaaacaagaataactaatgaatcaatgatactgtctaatttgaaggttaaatgattaggtagaactaaaatatgaaacaataatagtatgtaagtcgggaggaggaggatgaagcttgaagtgctctatgcatcttgcatctctggtgtctttcttgtgtccaaactttttcttctttcaaggacaccagttagactagattagggtccacctaatgacctcattttaacttatttgcctctttaaaggttctatctccaaatacggtcccattttgaggcactaggggttagggtttcaacgtataaattttggggggacacattccagccgatagcaattataaatacaacttttatagtaaaagcccatcttctagaacaggtagagaacaaggttacttattttttttaagaacaaaattggtttaaattatcctaaaatgattttaggagaaaatggacattaaatatacaacatttcctcctttattattttattgatgacttgatatgttttttaaaactcagtaaaataaatgattagtctcataatcataagagagttatgcccttattttaatgccataaaactgtgacttctgaagaaatacaatcatataaaatcatattttaatttacttttgagaatgtacagtaactcaggaaggcagagtgtggaacctgctttaatgaatagataagaatgactagcaattaaaaattaattatctataattcttctgaagttcttgaaaataatctcttctaacctgggtaaatattcctccttttcagaaatgtttgcaatgttgcttttttttaaattaatctctttttcttagataatggaacataaatcttaggcacatttgctttgtaaataccaaattgcacacagattaaaatttaatgagcttttactgctgtaatctcaacaagcagagtctttgctgttggtttttcaataagaaatactttattttgttatacagtggtcattaagaaccttaaagataatcaggacagattttccaaattgcataatgctattgcctagctatttgcatgtattttttttaaatgacaagacatttcgttaaatatttacttgcctgacgttgaaagatttagacaaacaatgtacttctagttgtcactttttcaaaaagattcttagggaaaagttagccgttttgttggttggtaagtgatgggttttcttggaacgtgttgcttgctaattttaccagagaagaaaataaattcaaatggtaagctacattccaatttgtattcttcttctaaagtcctccctgtttgcattctcggattttgacactcctacacaccagttaaagcacttgttagagtgtccaaaaaattgttgcaattaatttcccagtctcttctctctttgatgtgtcactataatgctttgagtaattttcagtgtctggcatctgttcaaggacaatttctggattttaggagggggagaagcaataaaggaaacaacatatgttttttcctaaataggaggcattttttgtttgtttgtttgaacaaaaatcaaaaactttcttttctatataggtgacaaaaagatacacgactcattggttgttaactaccattgcattcttttctctttggagtagcccttaaggaccagattagaccagccatctgcatcatgtagcatgtctgggttacctttcccaaaagaagttcagatagatgaactttgcaaaccagagccatctgaagtttgttttttctttttgagacagagtctcattctgttgcccaggctggagtgctgtggtgcaatctcagctcaatgcaacctccgcctcccgggttcaagcgattctcctgcctcaacctcccaagcagctgggactacaggcacgtgccaccacgtccagctaatttttgtatttttagtagagacagggtttcagcatattggccaggctggtctcaaactcctgaccttgtggtccacccgttttggcctctcaaagtgctgggattataggcataagccaccacgcccagtccatctgaagttttaaaatggctgcaggtatcttagtaggagactaattttattttccaatgattagaaaaaaatgaccagaccaagaactctagggttatgtttcatctcatatcctgtgcaggatgttctgagaagtttctatttgtatctgtggagtggttctagtcttgttcatcttgcattttaaggtttggaggtattttatcttgccttgcttctttaccaccttgctttaatttccccctatattgccatttctaaagtaatgactcattttcaagggtgggtctgaaaggaaagaaataataaaaccagagatctggagaagtttctcgttcatggtcttattcactttttaataagagcatctagaacagtgagtggtgccccagcagatatctggaaatttttgtggaattgaattgaatttgttcttagagtaaatgacaataaagaaaatagtattatggaaactttcgacccaagggaaatatcaaggctaaagttgctatattatttttcttctgatggatgctgagtttttctccttaaaaaacaaatccacatttaaacataaggcattgtttgatggcctatcacattcagtagaatggatttgagaaatacgtgtaggatgcctattaaaaactctgttttgaaattaaacctaagactataagattgtctgtttaaaaaaattattgctgctgtaatttgagcaaatctgaactatattgaactttagaaattcaaatgtatgcaatcttgtaatataacttactccatcggtagacatagttctttgtcccacctggcttccagcagtttgtctgtctgtcattaggctaaactcttcatgttcctaaacatgttttcctcaaaaggggacatatttcttgggtcagatgtaaacatcaagctaaggagttctgctgtgcgtctagacaaataaggttcattttcatcctctacatagtgttaaacttgaatttaagatcacacagattcctttacacgttaccaatgtaatgatatagacaatctcactttattcattcactctgtttaattcattcaataaaaacgtatacattggctgcctactgtgtgccagttggtgaagatataaagatgattaaggcaagggtctgtgctgacatgcctaatgggcaggctgacacacctaaacgccagggaaaaagagggatgagacctgggcctctgaagccctggccacctggctcgaagctcactttaatgtgcttctgggtgtattccatgactttttaaaggcgcttatgtttcctttctggtaaagcatgtttaacatgcaaaatgcttatttcattgagtagcttttaaaaagtgttcatagaatgtctagaacagtgcttgtctaatagaagtataattcaggtcacgtaggtaatattaaattttctagtagccacattaaaaagtaaaaagcaacaggcaaagttaatatttttttttttcctgagatggagtcttgctttgtcacccaggctggaatgcagtggtgtgatctcggctcactgcaagctccgcctcccgggttcaagccagtctcctgcctcagcctcctgagtagctgggactataggcgcccgccaccacacctggctaattttttgtatttttagtagagacggggtttcaccgtgttatccaggatggtcgttaattttaataatatattcattaattttaataatatattcatttagtcctatataaaaaaattagcatttcaacatgtaatcaatagaatatattattagtcaactattttgcattctttgttttgtaccatctttgaatttcaatttgtattttatacttacagtgcatctcaattttaatgctaaatgtcatcggagatattcgatctctgtttagctttaatatatttttgggttgaaaaagtaaattcacataaccaagttcttccaaatatacttgaaagtgtttctgataactgagttatcaacttaaaaatgtaagttaatgacaataaatgaaagaaaaattctgttccttagctgcactgaccacattttagtgttcaatagtcgcaggtggccagtggctatcatattggatagtacagctttagaatgacagttcagtgcaacaagtgctataatagactcatgaactggaagctccgggaagttaagaatgggatcaatgaagtgggtcttgaaaaaccaataaaaattcaccacgtagagaggaggagggcgactactccaattcaatcttttgaaagcatgtgaaggagcaacagtagacttctttaattatttaatagtaatttattgaacatgaattatgggaggtgcatggtgtgggtgctggtgagacatagttcctgagctcaagtagcttggtgtctaaatattcatgggcccatttttcagaaaggatggatatatgtgtgatcctgggtgtgccaaatgctgtggcttcctgaagcttagatttccagcttgtcaccttcaaggttaccttgtgaataggacttttttgagctgtaagtaaatttactttgcctatttatttccaatggaaaaaaagcttttttaaaaaataaatctcatcttattgcctatgattggccaagacaacatggcccatacagaaggtttttgatggcttctgaggtctgttatcatttgcttattggcatttcagctgtcaaccagggttctgtcaaattccattcctgcctttagctcttttacttgaatacctggggcaatggcagaagtggttgctatttgtcacctttccaggatgttagtcgtgtccttgagacaaatagaaaatttaaagtcagatgacttgattcctctgccagttaagacccttagagagtcctcagaatgttgcttatttttaaatttcaagtccctggtaaggatcaagtaaactccccaatttgcagatttctatccagttgactatggattttgcctgttgctttgtttccaccaactctccctgaagatgaggcgcacagacagacaactcacaggcaagaacagcctggtccatcttgaaagattctcaagactattctccacaagataattgtctacttttaaaaatattcagtaaagggaatttttgctgttatccttggttgtgtttttagtatctcatcatccttctagttgtaggaggcttttcctaacatctaacccatatgtctgttgtctcatcaggtgtttctattaaggctacttccccatcaatcttaattttttttttaatcttctgagatgtataggttaagttgaaatcagagactttcataaaatggtaagatggccatttaaacgcaactatgaggaaataatgtaagcaggattccattggagaaccaaacactagcaacaactaacttggtaatcaatgttgggacttgaagttaggctaaaatcaatagtaatggcactcgtatgtacaaatgcagaactttttacacacaatgatttttccctctgttattatacactagctgtgtctgagtagacagtccagctccactacctgcagtccaccctgggctgtgtaatctgagcactgatgggctgttatttgtacgtattacttctatgacactgttttttcatctgtgttagaaatgtctttctttcttgaataagctgcttcaatttcttatagacagattctgcttttatgacccttgtttctacaaagtaatctctactcatgctgaaatctcagacaattttaacaaatatttagagtacttaatttttctttgaattctaaatattatccttctttagttcaccatagttggatattttgagataactgtggaggaaacagcactgatcctggggccatgaaacctgatttcaagatctagtcccttctttaattttgcacaactaatttaatcacattcatccttaatttcatcatcattaaaatagcagagaataattcccgtttcatggagttgatatgcaatgaaatagcatatcaatgtatgtatgaatgtcccccaacatagagtactacacaaatgaaacgtgtcactcagcataacgttatgtgctccttcctgcaactggattgcactccagtgggatttcatgctggtgagatggctgtgctgctggacttcatgggacaccaatctttgaaaataagcctgatctggctgggcgtggtggcttatgcctgtaatcccagcactgtgggaggctgagacgggcggatcacctgaagtcaggagtttgagaccagcctggccaacatggtgaaatcctatctctactaaaaatacaaaaaaattagctgggcatggtggcatgtgcctgtaatcccagctacttgggaggctgaggcaggagaatcacttgaacccaggagatgaagactgtagtgagccgagattgcgccactgcactctagctggggcaacagagtgagactctgtctcaaaaaaaaaaaaaaaaaaaaaaaaaacacaaacaaaaaaaaaaaagaaaaagaaaataaacctgatctatagatgaggccagtggatcttgtgaagagttgaaaggtcaggtatcagtcttataccatgtcggatggggcaatcgtcataactttttaaaaaattatttatttattttgagacagtgtctcacgctgtcccccaggctggagtgcagtggcatgttttcggctcactgcaacctccgcctcctgcgttcaagcgattctcatgcctcggcctccctagtaactggattacaggtgtgtgccaccatccctggctaattttttgtatttttagtatagacagggtttcaccacgttggcccaggctggtctcgaactcctgacctcaggtgatccacctgcctcagcctcccaaagtgctgggattacaggtgtgagccaccgtgcctgccccaattgttacagctttttaagtggattatatgcctgcttcaggcattagacataataagttaatctgttgataagtttcttcatttcttaattttcagttgtgttttgatgtgtgtggtctgggtgagcggctcagtgctgctgctgtggagaaggcgtgatatggaagggatgtgactgtccttcttcatcttcataacggggccaggactggggtgaggtgtgtgagatgaatgaagcactggttttgatacaaaatttaagaaaaatcaaattcaagaggtaatattttaatacgatatttgtaaaaaatcaaaattagtgcaaaaatttgtgatgagcaaaatgttagataaaggcattgttgcttttctttttctgtgtattgtaacacaccatcacttagtggagaaacagctctcactttcctcctccccagatacaaccatttatgttgaattaaacttctagttctcctatacctgtgagcatcccccaggccccttggtatggagaaagcagtttatttgtcttagtaagattataaaagtggcaataaaatgtgaatgtaatgaacaaaatgcacattttgtggaccaacttgttgttttagatctatttttgaaaactcattaggtatgtgcatgaggcaaaataattcaagtgcagttggatattaaatgaaaaagtgtcaggtccccttttctgccatattctcttctgtgtcttcattagtggaaaccattttgaccagttcttataattctaatgatttgctgatggctctaattcttggtttatcaacttcaagcagaatgtcttgacatcttggtatgaaagttaaagaatatgaatcatttgttctctcccttctcctttcctctttctctgcctctcagtttttgttgtatgctcacggagtatgtgtgtgagcatgtgtgtgtgtgtgtgtgcacgcgagcacgtgtgtgtgtgtgcgcgcccatgggtccatttttgcatggcaggctttgttttagaaagattggttacaacagctgccccaccaatctcctctacagggaaggattcctactctgagaccttggtcttttccaggcagatcacttacatttcctcacagattatttctcatcctgcagcctgggtccaaatgggctttgctgtgaacagtgactctcaggcttctggtctctgctgtgcttgagtgtcgttgagatgctccatctcctcctactgcacccacccagcaatcatctctctttcaggaattcaccaaagtcttttttaaaattattcttttgttttgagacagagtcttgctctgttgcccaggctggagtacagtggcgcaatctccgctcgctgcaacctctgcctcctgggttcaagtgattctcctgcctcagcctcctgactggcagggactacaggcatgtgtcaccacacccagctaatttttgtatttttagtagagatggtgtttcaccatattggccaggctggtctcaaactcctgacctcaggtgatctgccggggtccattttacgtggcagactttattttagaaagataggttacgacagttgctccacccatcccccctgcagggaaggagtcctactctgagaccttggtcttttccaggcagatcacttacctttcctcacagattatttctcatcctgcagcctgggtccaaagtgctgggattacaagcgtaagccaccacatccggctcaccaaagtctttgggtggttgatgtcatatgcctccagttgatagcacttttaagaatttttcctttttgtatgctgttattatttttagaaggcttttggattattattgttaaagagtatgccatgtctatcttttaacttttaagcatctattgctttgttacttgtactttatatatatgtatatccttcccccaataagacaaagagtgcaaataatcacctcccttgcctgttgtttgggtttaattcaggagtcagtggaattaaaagcctaaactcagtatagttttaaagcagcagtccccaacccttttggcaccagggactggctttgtggaagacagtttttccatggaccagtgtgggggctggaaggtgattccaggatgattcaggtacattacattaattgtgcactttatttctattattattacattgcaatacataaggaagtaattatacaacttaccataacatagaatcaatgggagccttgagcttcttttcctgcaactagacggtcccatctgggggtgatgggagacagtgacagattatcaggcattagattatcataaggagtgcacaacctagatcccttgtgtgcacagttcacagtaggattcgtgctcctatgagaatctaatgctgccactgatctgacaggaggtggagctcaggcagtaatgcgagcaatgggagtggctgtaaatacagatgaagcttcacttgcacgttcactgctcacctcctgttgggcggcccagttcctaaccagggttggggacccctgctttaaagaatatgtttgtggattcatagagggaaacaacacacactggggcctttcggagggtggagggtgggaggaggcagatgatcagaaaaaatattaataactaatgtgtactaggcttaatatctgggtgttgaaataatctatacaacaaacccccatgacacaagtttacctatgtgagaaacctgcacgtgtactccagagcttaaaataaatgttaaaaaattccctccaaaaaggatatatttgcatcggagttatatttgtatatgagtatatatttgtatatataaatatacttgtatatgaaaaaaatatcttttttctttcattttattttccaaacattaaagtcgggcacattggttaggaatttcaccaatactttttacaaaactgaggacttggatgataaaggcactttttaaaagattacacactggcatggggaataatacctttataaagatgatctatgtgttcctgaatatcccgatgcatctcctagctggatcttccgctccacaaaaattcataagatgagattcttgaattagaatgcatgccttaatgtattaagtctatgtagagagagttatttagtccatgtaaattaagtgggaatatttttatttgattactgttttatctggatcttgcccacttaaggccttcaaaaatgaaatttaaggcctgttaagcagacccaacatcaacagcatattctctctctcttgtaagtattgtctagttgataaaaaatttcaaaaacatgtcttaatcaaaaacaagatgatccagcacaggtttaataaatgttttgtgaatatggcacattcgtgtctcattactacagttttcctatgctgtctttctcaataattccccccaaaattgtagtgtttacattatggcatttatagttacctctgaacctaaaaaattaacttcaaaagtatttaaaaaaatcattatatttaaaaccatttcatgtttaaatggtttgtacagggcaatgaaaggaaatgtagtaataaacacagaatcagatttggtcactaatatttttctgcagttgaaatatatgtagactggcttagggtctaaatagcattgaatcctgttaccttccatctataatcaattaatgtattatgacattgttgtcctcagatcactgggatctcatggtaagtaagtaaagggattattctgtgcattttcccaatatctatattagttttaatatacctttatgttaatgtatgacactgacacttagtaattggattaacttcctatcagaatttgtttttcactcatactttgtatacatgtcttaagggtagggtagatgtacatttttttctgtgttagcctatctgtttctgtgacactacatgctttctgtcctccaatttgtgtttctttccgtgtacaaatatgcatcatctaccatctacatctacaaaacatgtaggcttccaatgttttcatgtaaatacatttcatgagtcctcagtagagtgttagatgagtggttaattagtaatgttaataaatgtaaattacaataaaaacatttataatgttaataaatataagtttattgaacttaaataatttaaacatcttctgaaatgtagtagaaattatgattagccataactagtacagtattttttgcttgtttaatttttttggtgatattccatttgtggaatgagtgtgtgtgtgtgtgtgcagtacagacagaaaggagagaaacatatctgcatgttatgttagaaagagtagtgttagctaccctaccaaatttacatactggctgaacacagtatgtaaaaaattatttttttagtccattgctggtgttccttgttgttgggtgactctattccacatggtgatgcagggaaccaatctccttccttctgtggctgtgtaatcccttgcaaccttgaagtcctctgcatctaactttaggatgaggaaagtgaaggtggaggatatagccctcttgactgccttgacctggacctggaacatctcttttgctcccattccatggggaagaactagtgacatggtggcccatagctgcagaggggaggctgagaaatgcagcctctggataagaagcctactcccagtggttactgtacattgtgggagggaagcttgaattctgatggacagtgagaaccattctccacacaataacgaaatgacgtcttctcaaccttggcaatgtagcatcctgtgacttaagtatgtaaataattatcagtacaggtcagtgaaaaattaggtcacctttcccttccacttttaattctatagtttaatttgcctatctgctacatattatatatatgggaatagataagattatctataaacatgtataaatttgtttcctacactaaaaagaaaaatgacaaagaagaattaagttagttgcccaaatccacacaataccaccaggagaaagtctaggaaccataccttctaaatccaggtctacacttctttagtgcactaaattttttcctaatatagctctgaggagactggtgtttaagaggagaatgttaagccaaaagcccatttcacttggctctgtacagacagtaagttaatttccaggatgtataactcctgattttctgtgatgacagagaaaatactgacctgatttgggtaactctgaggtttggagatcttgaatagcctcatgttcctgaacttctttaccatacatgaattacttcttaggaagaaacatttattctgtagaatttggtttcgcattttatttttattttcttagacactggtagttggaaattcaggaagaatttgactacaaaaaacatttattaaaaagagtttctaatctcacctgctaagtgctacaaggaaaaaaaaaaatacattttgagccctcaaggggctccaaatacggttgaaggaaaattagacccagaatagtatatgattaggaacaaaacgatggcagagaaatgagagtttagagaaaggagagataatcctgagttaccttaggaagagaaaatttcacagagaaaacggcccccacactgatttggggaagatgattcagacttgtctcaatggcatgaggagcaggggccagatgggaaaggacatcgtggtggaaatgacacgatgagcagaagcttagaagtacttctgcttcacgtctgtgattctgcctctccccttgtttctgcagtgctaagttgagtgtagttccccacacaaaccctgagctttcttcccctccaggctgctccatcagtcagacaggagtgccttctcaggggatcctcttcctcatcttatcgggccactcatctcgtcgcagacattcccatactcctggttgacttgctcttccctctttttaactgacatgagcaggcatcacctcttccaggaaacttccctgacaccaggctgagtctctctggtgtcggggaaggcttctgtattactgcatctgccattttgatttaaggttttctgctcattccaactcaacagtgagctctttgagggcagaaattgtgtcttattcatttttcttgttatgccctaaaaatgtattgtgataatatataagtaacgtacaatttaccattttcacctcttgaagtgtatagctcagtggcgttaagtgcattcacactgttgtgcaaccattatcaccattcatctccagaactttctcatcatcccaggcaaactctgtatccattacacaatagctctccatttcctcctgccctcagcctcaggaaacctcccatctactttctctttctacgcgtttaactactcatatagatggaatcatccaacatttttccttttgtgcctggcttatttcacttgacataatgttttcaaggttcttttatgttttcttatgcgtttttatatctctctatctttgatagcacccaatacatagaagacaatgaatgtttttgtgagtgaaaacataagaccagaaagaaataggatgtcatattctagggacactcaagacactttcttgaggacagaggcactgtagcttggaatttggaagatgaggttggcaaggtgggtggggaaaggatggaaaagtgatacgtttcttgaagcatgtggatttgcttccataagcagtggtggaccagtgggcacccttatctattaaaagaatgattttttttgtgactcgtgtagagcactgtcttagttacctaccccagtggtagataagagaagcggattaaaaagagatctgaacctgaggaaatggagactaccaagttttttgtaaatatgtctgttataacatatattatctagtacttgcgatgcctgtgccaaagcatgctttttggtttagttaagcctacttagctcgctaatttcagtaattttggcttgaattgcaaaaagttgatgggggagatgggggagtctctgacatccttcccccactcacaggtttgaaaaataaaattatgaagagcaaaaggatctttttctgtggtaaattgtacttcatgacaataaacgagttgtggttttagtggttaatttataaattaggccatctggttcttctgtaatctaaagatttttatatatatgtaaaatacaaagttgtcctgggcaactgccaatctataaaggagaaaacatcttgaactctgtggagataataaaaccatattcagctgccaaagtgctgctgacatactgtccaatgagacacccaacgcctttgcattacagccagcaaggtgtggagctagatgtattgatctatttaataatattagcttctcttctctgggtcggacttggcccagagcaagtgaacaggacctatctatctccttctcaaaagtcacagctttcttaccaaattgtacaactcaagccacaaagaaaacaagtcaaggaaaggaccagaggagcacgagggcacatgccttgttcccagaccctgggaccagctccagctctggctccttgcagatcccgctcttctcaagttctctggctttgatcctagttttctgccctactattcctgacatgtacagcacttagcaattcataacttgctttattaaccaatatctcaacagaacttttaaacaacctgggaggaagcagagtgggtgttactgtcctcattgcacagataatgaaactgaggttcagaaaggttgagtgtcttgcccaaggccacacggcttcttagtggagaagccaggatctgcaccaatgtcttccattggacacactgccacttaatatggtacttagtttttctttctagatgaagcagtatgaggaattctaccatggatatctctctctatttttttaaactgcaaaataatgataatgataataatgaatacttctagaatacagtctctatgccaggcactatatgctttatatgtactaacttgcttaattctcctaacaaccctagaaggtagttactaatattatcactatttttaaatggggaaactgagttacagagatggtaaataagttgcccaaggtcacagaggcagccagattagtgacaaaagtttgagagtactcagtttgaattttacatgttccgtggatatggtttatgccaaataccttctcctttctagacctcagtttcctcatgtatcaaacaagtggactgcactatacaactctgaggtcccttctagcctgaagattagagtcttttatgcccacatgatatggaaaacattaatgctggctctttaagactggaaccttgtcatttaaaaaaataagctctactaaatttgcagtaaactgtccaaatacgatctctggtctctgatttgtatctctcacagagcatgatacaatgctagacacatatatactcattaaaaacttgctgaattaaattgtaaaacattcctccagatagaccgtaagggtgagctgatgccctaatatgctcctcagctgctgacttaggacccgtgggtgacaaaccctgtccttgttgttccatctgtgacagtgggcagtgtccaaaatgagtctcttcatcaaaagtgagtccaggaaactggatcagagtaagtaaggagtcttccttgcttctttttctctaaaatacaatacagtgcattctagcaaactaccagcatgcctataaatctcattttaaaaatatcaggaaatagatgctcattgataaagagggtaagaatgagcaagggagagagtcaagcctgtacatttgtgcttagggtattttcatttgagaaattatcattggaaagatcaatttccaaggcaggcgttttgtcttgacttaataaactaatctttatcaataataattaaataatgtcattttcccagatacaaaggggaaaccataatgcctttcatatgccttctcatatcttcagtgtttctcaaacccagctgtggggtctttttagggaagatacaaggagggtgagaccatgtggagcacacactcagcagccactgtgaagtcatgggtcccttgctacctttggaagctgacaatctgcatgaaaagcagcccctaggaacatgggtagtggcccgggatccaaaactcctgaatccataaaagggcttttgacttcttgttccaggacaagtgacatctgacatgcttgcctgcttgtttgcctttcttccttctcctatccgtctttccatccatctgtccatcagtctatctgtccatccagtcatccatccatccttccatccattcgtctattcatccatccgtccttccatccatccatccaagatttattgagcacttacatgacaggaagtatgagacacaaaagaaaattctacacaattctcctagggacatgaactaatggttagcaaaaatatatgggaagtcctgcttcaagtaaaattatgacttaagatatacatcagatatttgaaaaagatatttttaagttcaacattgaaattctaactacattgtgtccttaatttctattttctagttagacttttttgaagatacaaatcatttgaattatcattattattgttacttgattttatttattccacatgaatggtaagaattttaaaggaaggtgggtgccctaaaaatacatttatgccaactggattgaatcaccttgaatcacaatgagtacaacaactgctaatgagctaacacttaatgagtaatgaccaggcaccagacactgttctagcactttatacttactgatttctttactcttcatgataaccctatgaggaaagtgcttttttgttaagctccattttcagctgaagaagctgaggcctggagaagttacatagctttctcatggtgtctccactatgaagtagctgagctgagatctcacccaaggccctgctgggttcaggccacactcttaagtactcacagctgcatcacactgaatatcatctccctgcactgccatttcatttgagcagggctttgcctgtcaagaacattcatatcttttgataaacagtgcattttttccctgatagtctgtatgggacagcctccttgtttgcatctgaaggacagggacttcaggacctcctgctgtggtcaccaaggaatcacattcaaacttctcagcaaggtgttatggtccttctcagtttgcctacgatccattgaggcaaaggtttccttctctcaatacaccctctgctttagccagggggacctcccactgtcctctctatgtgttctatttgttcctgactgttagtacccgcttgtgtggtttccatgatccttcttctgcctggaatgaggctcctcttgagtcctgagagcttcatttctgtctgtcttttgggctgtgccaaagcccctctgccttcgtggactccccactgattcattaccaattttcctctcctctgggctcttcttagattgcaaatggtgcctctggattgggtaccaagacttgcagtgccttattttgataccactaatatgagaccatgttatatgcctcttgagatatcattccctttctagcaatagacagtgataagcatgcgtatagagggtaaacgtaggactttgaggttcatccatctcaatagacaaaagtaaaagtatgctaatttcaatccttcacacagtaaattgaatgtaataggtcttcagtaactatttgaggaatgaaattgttattgatatattgatttaactgagcaaatccataagtgccacgcttggagtaaagtacagggaatctcattttttgggtaatttcaaacaagtaggagaccatccactatctattaaggacaaaggagatttgagtgacaaacatgttccagaccatccaatggtgttattctactacttcatcccagctagtaaaatggggcaataagaaccaaaaagcaggtactgtccctatgtaagtagacttcctagtcctggccaaaacaaaaacaaaaaaaaaacaaagcaacacaaaacaaaaacaatgtgtgaagagcatcttaccgttcattgctttggatgatttgtgcaaatctagttaatgggggtggatctgatcagtctttgtaggaagtcagtattggcatatgtctggcttctgaattttctaaaaatataattatttatttttaaatccattcaatcaacactgaatttactaatcaactactaaataagtaaaagatcctatagtagatccttcaagaaatggaaattgagacattaggtcactataaaccccaacccttgtaatctttttgtggcaaccttaggaaacttggaatgctttttacactctgataaaggtttaattgtaatcatagccccagtgttgcaaaatgagtcagaagatacaaagtatctcataggataatattatagctgtaggtacttcaaatggacaagtataacacattatgactgctaatatggatgcattgggaggaaaataagccctaagaagcaatatgcagaaaagctatgattgctggagacagatagatccaagaacctaggtaatttttcagcaaactgtggttccactttcgcctctttcttgacattgactgtgtttttaacagggaaaaagttatctgaaatttttgatagagttcaaactttaaatcgtgttcactttgctaaaactccactggatggagtggcagaagagaaaaaacacagaaataaaagaaaagcagtaatggagaatggaaaatctttaaagatgctaccatcctgaaaagattcgaaagcaagcccaggaaagccacggggagggaaagagcgcttagaggtgtccccaaagctttcagaagtgatgagggaaaccccagctcttcttgttacttcttggcattttgttcctctatacgttagcttttggttaatctttcatgttacttattatctctgttttaaaatttcacattaactcattggtttcatatcccacttaacaaattagatattttccttgggcttattaagaaaattatttgctctcatatgttatggctttagattttctgtgtagctaggactgttcttaaatttttatctttacctttgttatttctctgaagcatccccattggggtggcagtggggggtattaaatggttatgtaaaatttacatgtaattgtgcaatttacacatagcctcaaatataatgaggcctagtctagctgcccataccaagaggatattatagttgccaataaaatcagtattatttcttttttttttctgttcttttttagcttcttgcaaacattcactcagaatcctttttgaatatcagttttgtgaaaagcaccgtgctgggttctttgggaaaagccaagatgagggcaaatgcatcctccttcctagtgagtctagcacacagatgactcaggaagtcatgcactggaggaggagtatcttctagaactggggaaaggttaaggaagggatcagaaacctttttcactcaaccaattacattttcctgaaagcatgttattaatcgtacatgatcttgcagaccccagatagagactatatcactatatcaattgttttcttgaacaactggagttaattctcatatgtttggttacccttcaagtatttatgtttaggatctgttttcttcctcttaacttacattccaaagtttaggtatccttcccctccatttgctgtccaaaacagcatcctttcatgtagctacatgccattggaatgatttggtttttgccatggattcctagtcctaaatttggacttttattggtatctaagatgtcatggacagaacccacagatgttgtacaaaaagggctgagtggacagtccaacagagttacatcatctgttccaaacacccttgtaatggttgtatcagcgtcaatgtctgagttgctgtcctggttctcctggccagtcctcagctggccatgcctgttcaggcaccagagaaagcttcatacctcaggcaaatctttacaagggatttgaaaggcaagaaacatgtattttggaggttttacctgtttatttcatgtatagcttcatattaacagattttgctatcacttaaaagtaaataaaatgattttgatttctcaaaatcatcttataatttattaatctattttaaggcttgcatttacatttaatcttcaaatcttgatgcattttcacagagtttctttagttagttaaggatattaatgacttcctttaatagttgatgaagtgagtcatcatcgacagtgagtcactaaggccaactcttgtacctgctcttaaatagcagttgttttactagatttgtactgaaacctttttaaaaatctgtttgtcttatatataacaagcatttccagtagttaataatactttcttagctcttcaatcattttatgagagcattacaagaaaagcaggagatggggaaagagatatcttgtttgccatgtaggatgcatgaaattcttacttagtctgttgtgttttggattcgagagaaaatatgtaatgaatcaaaatgtttcctacagtcctctgaaaagatgtaatgagacagtcttccagcagcctttgatcatctgggaagtcattgactttgatccttatcctatcaggggctcttaccctggggtccataaatacccaggcatttttaagaagtggatttcagtataacttgtttcattttgtgatttttaaaaatattttgttttatgcacttaaaaccttaatctgagaagtcatctgtagactataccagatttccaaatggaataaaaatatttaagaactctcttatgtgtgtgtttcaacctataaattttatatgtgtagctcatggttaggtggtaagtagagaatttgctatctgtgtaatatttggtactttttataatgaaaaaggaagtaatacaatgataggtaccatttatttgttgaccacccatattttccagggaatgtgatagatactttttatatattctttctagttttcaccataacatgctgcagggatagtgttaccattctcattttgcagatgaagaaattgaaacccagaacaattcgttcattcattcaaaaaatatccatagagcatacactaagagaaggcactctgctaggcaccagaaattgaataattgaccccaaatcacctaactcataagtggcaaagctggacctaacaaagcccattatcccttctatcacacattccatcctcataatatcatattctacatagaaaaacttaacagtcctgttgagacacttggaactctaagaaggtagtcaacagatacttttctctttatataaatatgatatctaattagcttttcctggaaaggagtgattctgcctttttttaattctagcattccctgagcaaattagagcccaggtaatgatttcctgagataagtcaattctcttctaggacaatctctagtcttgtcatcatgagatggaataacaacggtctatgtcatttcagtgacggcacctgcatgtccttgtatctaagaaaagacacctccttctctgccttgctaaatatttgtaaactttgctttaattggtatatgtgccactgttttgtatgtgggaggggtttatggttttgttttgttttttggtcttttttagtaaccccaatccaaactattctcatttgtaacctaaaatacttagaacaagaggctttgcaatcttgaagaccgaatacatttttactactaaatgtaaggcagatttgagccacccattttgtagtgcttgattatggcaacccgaggaaactaatacggttactctttatctttattaggaaatactgctgtagttcctgttgtaatccttagggagccaacattgttgatgagacctagtaccaagccagaggccatgttgaactagcaagatatgggatagtttttactttcaaagtaattagcatctagagtctagagagtttctcttacagggtggcctggtgtcttagtctattttctgttcctataatagaatacctgagactgggtaatgtacaaattataaagatttgtttgactcacaatcctagaggctgggaggttcaagatcagacagccacatctggccatcctttaatgagggcctcatgctgtgtcataacacagcagagaattggaaggagaaatgggcacatgcaaagagaaagaaaggggacgaaaggggctaactcactttgtaactatgagactaatccattccctggagaactaatttattctcatgagaaagacatgaatacatcttaacatcctaatcacttcttaaaggcctcaactctgtacactgctacattgtaacaggcaattaaatttcagcatgagttttggtggggacaaactacatcccaactgtagtacctagctacccactttatttttagagtggctatttaatgacctggcaagatctactgtgcttgtaaaagaatccaccatgggttaaagaaaaatagtttctggcttccagtctccttttggcctctctctagaatggcatatacaagttcagtggttactgacttcaaaggtggggtggaagacactgaaatgaatttttctcctttctttggttggttgctctctctctttgttgctgaaatttgtgtaggataatggaatgaatatgggagatagggaactatagaaagactggagggaagggagaagtcttttctgaattaaccccccatgtgcttgtgagacccttggaccccaaagggctcctgactggctgggcccactccttctgtatatggagccatagggcttttctctggcttcccagttgaagcattgtcatatgctttgatgctcagcatttctggcaattttaccttgtaaaactcccgtttcgacattctgaacttaagtagaaaatgggaatataagcctcttgttttttgctcttaatccattccagaactataagtccctgggttcttggcaacaacaggtgttcctctagattttaaatcaagtgtgtgtgtgtgtgtgtgtgtgtgtgtgtgtgtgtggaatatctcactaaaacgacagtgttgtcatcaattttggcttcatggagggtcttgagctgggtggagatgggaggaagctatccttgtccatgcggtttggagacttgctctaaaaaagagaccgtctacttccctcgtagtttttgttttgaagacatttgtagtgtttaccaggagcatacagttatctggaaaatgcagactgatgacaatagtatttgaaatgctcgtagatctgcttctaggttgatggaaagaatgtatgttccaaggtacaagtgcttgttgacttttcggatgcagccagtctgtgctctttgtcaggtaactcggaatcactccacagtagctgtccttcctgtccatttgacaagcacttaaaagggcagtcttaagtactttacttcatagtttattaattttttcccttctttagtttgcaatctactctcagaaactgaaaaataatttcttttacctttttcccctttctcatttaagctgaaattgatttctttctgagcgtgtaaggaaaaaaataaaaagaagctgtggttaatacaattgcctttgctgaacaaaaataaaagactagtttaccttcaagctgtgctgtatcagagtaaggatctgttctgtcactcccaggagattttgataagagagagtacaaaatttcataatatctacatagcataattgtagcaaatataagaagtattataattgtttatttggggatgagggtggggatgggtttttttgtgtgtgtttggaaaattgggaagctagaagatactcttaaatccatcagcttcttcagaactcttctcaaatgcttattgtcatgacaaccatctcttcataaaccaaggctctgagtgtaatacagatggggctggtaacaaggtaggattgccatctgctttgttttctctaagggacattatttttttgtgatccccaagtctcatcctcaaatctgaaagtcttgacttatttttctttctggagtcagatagagctgtgagattaattcttttctcctgacaaactacttcctcacctgtcatcaaacaacttacttgttaaatggagggaaaaaagggtaattatgtgtgtgtgtgtgtgtgtgtgtgtgtgtgtgaaaacaaatatacatattttaatgatttatttatctgtctactttgcaaagtctcctatgaggtacctagtaattcaataatacagtcaagtgtgagatccagaaacaagtaggagtgaggcaatcattttcccatgaaacaagtaaaattattactgcttttgaacattttaacacctgtgcttcctgatggtggggctgcatgaagtttgtaagtagtgtcatcattctcttattaggtaacaaataggagcataattatttaggagaggaaaaccttttcttgttaccaaatttggtgagaaatttgccaaagaaatgaatgcttacaggagggatacagcttaatatcttcatactcccctttgtcaaagatacaagtgacattttctcatatcaacttcctacaaaaagtgaggccatacatttttaaaaagaatatacccagtattttaaaagtttgtatatatcgtgatcagaattaagatatatccagcttttgaaaaaatatacatatttagccattaaaaggtatgtggtaaactaaactgatgaataaaggttatgggaaatatttcataaaatttatatttaaagtaaagaacaatttctctctttgtattatagttattttacataagctacaatctataattctaaaccttaatttcttgaagggctttataagcctcatttttctttctaaatagagaagttcatacactgcttttatgtcctatatgttgatgtgtaaaaataatcaaatactagtgggtgagtagaatgtaactacaatatggtacacacacagacacacaggatgactaaactgtgcacatgagctgatgtccagagcagggaaaagctgctaaagaatgtttgaagtagagtcagaatgcagttttgtggttaagaccaataatttttcaaaggagcattataaggagtgtggttacttgggttggagttgaaaaccaagcaacagttgggcagacttgaaaccagttttgtctttaggtttcttttcttaatgattggtctacaatgagttagccactcatcgtatttaaggtcttggtaaaggagagactttctttgccatgtagtttatacctcatgtatgcattacagtagagagctccaggaaatactgcaggccttctactggtttttatcctctatttagataaaaatgaggaagaagtagaattatcataaacaatcctgttggcttttagttgagatatactacagaaacatcacctttgaatctgtatatgtaaaaaaaaaaaatctcagagtaagatataagttctgttgcattgttctgaaggaatgggtaatgtcagaaatgtcttcattacattacataaagtaatacacagtgctgttatcagattgcatagtcaaagttggcaagtttgcatatttacatagatatcatgaccttcatcattcatacttctttcaagaaatggtcatcttaatatggggtatttatttgaggcatacaccatttattttaagaagcagtacctttgtttattgtaaaacttctggactaaattcttcaattttttctcaaatgaattcagttttttgttttttttcttaccactggtttttactgcatagcgtttgcctgaagaacaccactttgtttcccaaggcaagtagtcactacaaggcgagttttgttctgtctatcccaaggcaaatagacagcagcaaacatagtgtggagggctgctgggttcagtagaaaaccatcaactatttctaattgggggtgtatgaagacagctgcattctggacatgctaaacatcttgaaatgcttggagtgtaataaaaccccaaacgtgctttcttttctcatttctttgcacatgtattttaggcaaaatataatccacatgctgttgttccctctccttttaaatcatgaaaaatgttgtttttatagggctatttgaggtccaggatgcctttttatcctttttattaggttatttttatatataaatgaaaagaaaaacataaacagaaaatacaacatgacatcatgaatgagggcaagcacaaactgcccaatttaagtttgaagttataaacctaaaatattttaaaacaaaacatttctcttggtgttttgcaaaagtaatgctttcttctattgggcagaaattgcagcctgttgggatgaaggagagaatagaactaatatttattgagtagctaccatggctttctgggacatctgctaaccccttaatttttacagtaaccctaagtggtaggccagtccatctgcattttacagacaggaaatgctttcagagatattaattagatggctgtagaccacagaagaattgaaagtcaggtcttcttgacttttcagctcatgacttcattacttctgccctcctcattctgttgggagatgggtgggagtgtgccctccagataatcagaaagtcccatgttgggatgtgatttggaaatagctagtcctcaggcctgtggacgaaggctattgtagcctcaagaaagaaagagtcagcttgatattggcaaggtggttatttagtgtggcagctgcataagagcattggataggtggtatgatatgggatgggggtcagggtgagagctgctcacacctccttattatggcagggcaaaaccagaatagtcacagtgatggtgatgtagggtaggttcaagagaaagctcatgttcttctagcattgagactcacaatatttcaaaacaagtgattatttattccattactatttattttggtgatggatgttgcatttattttattttctaacagtagtacatatttggtaagagttgtttgtgacattctttatttaaatggattaaacccattttcttaatttttttaagtgtttgtcctgttatcgaagatatcttaaagtgttacagaatgggaatcatagctttaatgagtctgcatataagagagtccaaacattttttttttggagagaaggaaggtcatttcaactgtactataggaacgatagggcccatgatccatggtatggcaataagttactattttttggagaataaatcgcaaaatatgggacgtgaagactgcttggtatttacacaggagtctagttcttctgatactatatattctataagctttctcccagaaatccaaagttttatttagcttgtagccatcattgtgccacaatcttccttccatgatttatttttttcccatactgtactcttgcactgagtctttggcattgaaagggaaagagatgaattattcaactcttcttctattgagtgaaaagccaatacagaaaaaaaaatgcaacaggcaatttcatgactgacattttggagaacattggggtcatcatatgactgagaaaatgattatctcttttgaaggtcaggaaaccaatatttttttttccagtgaatctactgagggaaccaaccacctagctttttgtaaatagcactcctcagggaaatgttgcttttttcttttgcagtgtttctgctttgaatcttcatagactgtatcccatggaagcaggaatataattactgtagtgcttactttttttcatgtctctactgaagagccaccctgatttatcttttactccaaggtagtgtggaactttacaaggatttagattatattagtcattttgcttggagatctctgcacacttttcaacatcatttctaagagccttgccacactcagtaaaagagggtgaggcttcaagaatctctgtgtaccaacgcaaattaggcaatttgtaagaagtccctagtagagcagagtggagagagggctcaggatctcgtgaggcctggggcagggaggtggacatgctatgagctcctttcacagtcaacacaaagttaacacatcttggaggaaaaaccgttactgtataatggaaggcagaaggcagggatgtctgtgcttggtgatgaagctataagtagtgagctgatttatgatggaggggtgaattgtgccatgaaagagactcccctcaattttattagccagattactgcccatatgcggggtgaggagtgagcattttaaggcatttctctctgttttcaatatatcatctctggattcactattactgggacttgtgaatatagactagggattaaaacctgagtttgcttttaaaaaactttattttattaaatgagatttctgagcaactgatttcacttagtcttatcaaactattcttactactttttcgatatgcattctgtccctcctgtgtgaaggccacaggcccatggcccccatgtcattgagatggaggtcctcaagtgatggcgggatgaatcacctctcacttgccacctgcgagaatgtctatcactgatacctctccttatgtcccgtagcagctgctaagctcccacgttattattggtgacactttctagtgttcaggagagaacaggatttactttttgaatgcctctaaattattatagcaggttcatttggaattgcatatcagaacattcttcctgtttatcaggaaaataaaccaaggtcttgaaacttgatgtctatccatagttggcccaatataattttgcatgtggtttattacattatttttctccattggctatgaactgaaggcatctcatggatatttattccacgctgaaaaggtagttagatgctgtgtggtaaagtcgagaccagtatattggaagaaaagagacactccatctaataatctttcatagtcttcacattcattgagaaggttacttgataacctttcctgcacactctctcccaaccctgacccaggaacttgcagagcacactgtgcaacagatctaataacccttgtctgcaggcaatatgcacagctgggaaagataattaaatagactctttttgagaggtctacaacatttcaacggaaggatcgagcaatccggctggcctccgactgaaaactattaccaacagacatacttcagacagattccatgatcaccatccttatgtggcacaagtgcttatggggagcttctttggcttccaaaaggccactaaaactgtcagacctaaataatactggaactgtaaagtgggaattaaaaattataattccatttaacatgtaacgttctcatcagaaaggggcctttggttttccatattgatcggttacatggtcagctgcaattgtaactcatgagacacacccagatatcatcctgcgtgattctttttgaggtttatttagggtgttagataatccgaggtaggtttcatcatgggtggcaatattacatatagcaaatgtcatgagaagagagacaaagcctcccttttgaatgttaacatttatgcaataagtttaatgtaccgtgtaagtttacattactattatgagacttaacctaaaaaattggggtgaaatcttaaagaattatgaaattaagaaatgaaaccagagggctttcgttttaagtactgatcacttaaaccaaaaccagtttggcttatcctatgagatcgtgggtattgagaaagaggaacatttgctgctgcatccggagatgtttccttgagagcaagactagttccttttgacccagtacatcctacaggtaaatcactgcatgctgtagagatacctgttccctcccttcccccaccccctggggatctgaaaccaaatcattgctttttcatcttttacttatccttataaacaaagccacccactttctcatttttcctgatgccaagtccttctttacatgagtggaatccactcttttcaatggaaagacacctgctctgagacaggctacactgtcatgagccttggcatggctgagtgatgtagtggaaggtgcaataaatttaaactttaaaaatgcaaaatttgatggaatcatgcatcttgtgcctacagtgagtatatggtctagcaggatttacagatacatgcatgattaatttgaatacagtatagcaaaatgatctgttaaaaaacacatgaaaagatgtgcaaccttattagtcattaggaaaatgcacataaaaccaccgttcctgtgtgatacctctgtacgtctattagaatgtataaaatttaaaaagactgaacatagcaagcactggtgaggttgtagaccaactggtgctttcatgttttgctggtgagaatgtaaacattacaactactttgaaaacagtttgacagtttcttaaaaagctaaaacatccacctggcatgctatatacagatatcctactcttacgtatttaaccaagagaaataaaagcatatatccattcaaaaacttgtaaataaattgctcctagcagctttatttgtaatagccaaaaactagaaacaacccaaatgtccaatgaaaggatacatcgtatttatttataggacatatccatgcaatggaataccacttaggaatagaaagaatcaactgttcatcatacatacaaccacatggctaagtcttaaaaataattatgcttagttaagaagtcagacaaaaaggtaagagactgttaggagctgaattagcgggttaacagtggcaatgaaaaaggagaaaattatagctacctcaagatagaattgatgagctttgattatgaaatgatggtaagagagagggccatagactctgaggtctgtctctagctttggtttccctatgtggatcattatctatttggatataagaattatctgaaagatgatacttaagcatgtaagaaatgataagctacctgtttaatgatgagcttttgttacctccaagaaccccaagaagaaacatcctgtaagcagaccattcatacttgattgttaaaggaaaacaaaattccattttgtctttttcatcaacacaagtatagctggctaataaaagtgtaatattcatgagagaaaaagaaaagaacacgcacacacatacactcaacaggattcctagagtcattcccatggataagagggaaggaaaggttgagggcaaagagagaagggaaggaaacagactatgatgggatatcttagggcaaaagaatagggggctgatttggaaggcagcaaacttcatggatacttgatttatttaatgtccctgtcactctggcgtatcttaatgtgtgtggtgtgtgatttatttagtcacttgatccaaattctctaattaagtggagctcagaagatatagtgtccattgtggtcaagggcacaggttttggcttcaacagacaaataagctctctgagcatctgtcttctcatctgtacaatgggaatatcagttcctacctcttcaggttgttgtattcataaataaattgtgtacaagaaacattaggattgcttcttacccgtagtaagggctcaacaaaccttctcctccttctcctcctccttctccttcttcttcttcctcctcctcctcttcttcttccttttgcttttctccttccttcttccttcctttcttcctacctccttctcattattgttattaggtaaccacaatattatcagtaatgattggagaaagctttaatctcctagttcaccattagaaaacaagaacacattttggtggttattacccgaagtaatcataatgtcacctttttttccatctgactcattatcccaagtgatttatttatatatggagttttctgagtctttcttttacatattacaaaaaaagagtgtgatttagggacgaagcaaagaaataaaaatttagtgactttcattctgcctgtgccccaattcctattgggcataaggcaagtaatttaaatttcttagcaccttagcatcttctactcaaacagaaatgaggaacagtcacaggttactattatagctgtctaagtagaaggcacacaagttttcacactgagtataacactttatagaaagctaagtgtgttgctcaagttggtacatttctgtagatgtgacactatggcactaagaaacttaatgccacattgaaattcattgagatagctagactttaaaaataattacttgacttcactataaagtatgttcgtattgcatttactccatctagtagaaaatagaccttgtcagttcaaatccctgttgcattaatttcaccagtaatgagtctttttcatttgagtcagcagggtttttcttgcttgttttcaggctttgtggatttgaccctccatgatcaggtccaccttctagaatgtgcctggctagagatcctgatgattggtctcgtctggcgctccatggagcacccagggaagctactgtttgctcctaacttgctcttggacaggtaagtgacctggctgtagcttaggagtagcatgttctttacgatcatagttcattcatgaaactattttattcatctctcggtgaagcttcagagaactttattaggtatgtttacttaacaaaagagtgcattgggggtgatgaagcctagtcaaattcacagaaagctaaggataactttctgctagacattacctcagaagaattctattatttctaatacacacacacacacacacacacacacacactcacactctctctctctctctctctgtcattatgaatggtaattttctaactccatcttcaacttgtatcatataaaaattataataacctctctttaattaaaatctgttgttgcttcttgtacatccataccacaatagcctattcattttcttctccaattttcccatccgtaaaatgaagaaatttgaccagagttctgaaggtcacattcaggtcgacaaattcattttcatgttcaaatatgttaccttctttaacataccattctggggttgccttggaatgtgggtcccattgttttttttttttcagtcattgcttagagtcatagaatttagatattactcaatagcagctgccactgatagagtctccaccctgcaccagctgtgatgctaaacactttacatatattatctcatttaatcatcaccggactcctaggaggcaggaatgtcatcatccatgttttaccagaaaggaaactaaatctcagagacatcctgctacttgcaaaaagaggaaagctcactaaatggtggagccagagttcaaattcaagatctttctggctccggtatgctctgttacctcctgtgctgggcacatggtcttcccactctcatgttcagtgatgcctcctttggtctgctgccatagcattctgttttccaggtaaatcttgtctttgtgggctacataacattttggatgagaaagaaccattttgttgtttcttgcaatcctattttgcctccgtgccaagcagtctaaggctgccaggctgcccacagtgcatctctgcatggtactttacttcagagcatttcactatctttctacacctgccaagtgcctggagcagagttgcagcaaaatttatttaagtactggagaattgtacaaggtgttggttattgttttgtcattttgtgttaacacagcttttgaaaaacagtggtgatacagtttaagaagcatattttgctgtctgtggaatatattttgatatcacagtttcacaaaattatcaagaatggccactagtcttgttccttagaactgtactcacaatgtattctgtcagccttatagaggatgtctttaccgtgttctttcctttccattccttgtttcctttccattttttcctatctcatttctcctctcttttcctttgctttcctctttctttctttctcctgtcctcttaatttttttgtcttatagcagtgtggttttgtaaccaagtgatatcaagtttgcaaatgaaaatcttagaccacacgtaacatttccctgcctactgcctggagtgtctaccatgtttaggtttttggacattcataactcatttgctccttgatttccatcctcatctgtatctatcttcttttttaaaatttaattcaatttttataatgttgacacaattatgcagattcatagggtacacagtgatgttttgatacatataatgtgtggtgatcttatctatcttcttgagtacacacttgcttgaggacagtcatcaaataattgcattttgaatatgtgaaggtttttgacattactgcacccaaaaaactcatattgccagtgaggtgatatggcctaggattttatcagctacagccttctctttcctttctgtacactccagtggtggctaattttctttcctctctcacagaagtatgaatgactaaaagttctcatctctattcattcctactttctaaaacttcagatcggaaatttgaattacctctagaccaggatttgtcagtctctttactattgacattttgggtcagatcattctttcattctttcttggttgaggggttgatattgtttggtgtgtcctcatccaaatctcaaattatagctcccatagttcccatgtgtcatgggagggacccggtgggaggtaactgaaacataagcaaaggtctttcccttgctcctctcatgacagtgaatttctcatgatatctaatggttttataaaggggagttcccctgcacacgctctctctcttccccgttgccatgaaagatgtgactttgctccttcttccccatgattgtgaggcttccccagtcacaaggaactgtgagtccattaaacctttttctttgtaaattacccagtctcaggtaggtctttattagcagcttgagaacagactaatacaaggggctgtcttgtgcattttaggatgtttaacagcatccctggactccaccagctagctgccagtagcaacctccacttcctccagttacgataactaacaatgtctccggacatttctacctatcttctgttgtgtcagggggtgggggaggtaaaattgcctctggttgagaatcaccactctatgctttcccaactcaatgttctataagctcctcagacacactgtactctaaactgcacactcactttatcttctgcaacaagtctattccttttcttttctgtcttggtgacatcaacactcacctagacactaaagctagaagctttaagttacccatggattctaccttctccctcaccaaattatccagttaactatcaagtcatctatgaactgcttctgaatccagacctcccctctatccccattcctctgcatggcacaggtcctggttgtctctgctgcagattccttgcttctgcaccactgactcactttcttggtcctgctactctttctttcagtccatctcccatactgctgctggagaaggctttctaaggcacagctgtgatcatgatgcttcctgactcacctttcagtggctctctcaattcttaacatggagaaaccccatctctactaaaaatacaaagttagccgggcatggtggctcatgcctgtaatcccagctacccgagaggctgaggcaggagaatcgcttgaacatgggaggcagacgttgcagtgagccaaaattgtgccattgcactccagcctggatgaaattccgtctcaaaaaaagaaaagaaaatactgtgtagacttcttatcttaataatcatgaatcactattacaagtgtctcaaacgcaaatttctgaagagtcacaggtgacccagtgagcccttgtccaggctaaaaacacctggtggctgaattctgaacttcacacattcgaatttctcttccattgcttctgagagaccctccaccattacggttccttatcagagtcatatctacctataaggctcatttcaggtgccgtctttttataaaatcttccttcaaactttctcctcttcagcctttatatatacaaaaggcttttctttcttttccttttctaagtttccattgtagttggtttgcttttctctttattattctcattccaccatattagttatgattggatgtcttcttaccttccctactagctcataaacttcttgtggtcaaaaaccagatcttgttcgtcttgtgtgatctccagtttacgaagtcttccatgatacccaacaaatatttgttaattgcactggccaaggtcacccaggtggcttgtggccaaatcagaagaatctacatcttctgatagtcatggcagctgttattcccatccaactcacttcctgtgcattgctactcatcaattccccacttattcttttaaaaacattgcataaatacatatctatgtgttttggaaagattttcttaatctataagcgcatttggcgtgtgcttatatgtctgcttatatgccaaatttgaaattccaaatttcgccatttggaatttcaaatggggaaaagcaaagactcttatctttcccataatcaaaccccttatgaagtaaaatccttaaggtctctctacaggttaaaaataattaggtgatatgatttggctgtgttcccacccaaatttcacctttaattgtaataatccccaggtgtcaagggtggggccaggtggagataattgaatcatgtgggttgttttccccatactgttagtgtggtagtgaataagtttcatgagatctgatgattttataaatgggagtccccctgcacaagctctcttgcctgctgccatgtaagatgtgactttgctcctccttgccttccgccatgattatgaggcctcctcagccatgtggaactctgagtcaattaaacctctttcttttatatattacccagtctcaagtatgtctttattagcagcatgagaacaaactaatacattaggtatatgttaatgatgaggaatgtgtataaatacatatacatttatatttaaatattaatatttacaaataacatgatattaaaaatatggtctataattttttaaattatctacctttctaatcattaacatgcactaaatattattaaatttcaatattatttaattaccatcttggtgtttgaggataactgcttttgatggcattgatagatgcattaacagtgaaacattgtgaccaacagcccatctgagattttatacttgtagaagatggcttctgagtgacagctgagaagactgtttatgtctttgccctacaggttcctaacccctttaataaaatagagctctctgatgcagatgacacatgggccttctttttgctcttgtcccatcacattgtacatagtaaacatttttagcaacaaatagtagatacttataactttaaaagctaagtggttgacagctgagaggcagatgatggtaatttcatcatttttctcatatctcaggcattgtgacactacctctgcaaggtcaactgtctccataggctgttttcatttgcgtagaaataggggggaaagatagcttgaagtcatcaggagccctgcaacccatggattaccaatgttgctaactggagcctggatttcatcttcaattgattgtaatgatgtcttgttctctcaaatctttgcaaatctaggcatttataagactatcctgtaggtcccttacaagaccatgaggatgctagaacttaccctagtcttttcttgtaattgcttaaatgttagtattggcaaatggggtttggtgattataagagtaaaaaaacctgctgccatcccacatttgtgagcagaggatacatttcctatcttgtgtccatttaaaaagaatgattgcttgattggcttcctgatgacaacccatgatatactgattctgttagtttataactttcctagtagtcatatgcttataggccaattttatccttgccatgcttagcctagtcacaatttccagttcttctctgtatcctgcagcagtgagttccaaacacttaatgctgtcatctcttcctgtgaaaaccaagaaataaaggttattataaggtataaataaagaacccagtgatttctcttggggtgtgtgtgtccatgtgtgtgtatattttacaagaggaaagttaaagatactaagaatgcctgtgaaagtaatcaggaaatggagaaaacttgttttccattctagcacctaatcctttggtgtgttttggcactagaaaacacaaaatatgtcctctgtgtctactaggaatgcctctcttcatttagtcctgcttgagtgctcatgatggaaaaatatagactgaaaacaggagcaaaagtgttcatcctactcattccttgtggggtctctttgctttcaaagagatgttagagatgttagtaaatggtgttagaagaaacaatgtaaattgcctgtttagtaagatgatccagtttctaaggaactgttttactggcgccttccatgctaacaaattctgagaaatatttgcggatttctcagtgaagccaaagcactctcttttgactcctatttactctcagagaaaaaaactattcatccatttgaaaagcagggaccaattcaacaagcagaatattccctctactaagcctttggccagagagttgttgctctagttctttccatcactcctgcatcaggaggctctgcctgcaggaaatagtattggacaacagaaagttcttttacttgtaggcataaaataggtataaattctcctccttaagagaaaaacaggttgctgcaccagaaagaacatttgcctcttctactaaatagcagactgttttccaatgataaactcattttaaatagaaaaaaaaaagtcattctctacaaacaagaacattttcattttaggttgtttattgtaaatatttcagaaaaaaaatatgcaaaaaaaaaaatgcccaaaaatcaatgcttccagtaacatatttattagctatctttttccccatgtaaaacttcaggtaaattctttgcagattttttacttggaagaatgataaaaaaaaaaaaaaaagttctgaaatgagttgaattcatccacgtgtgtttttgattcacatgaagagtaggacctccctttatattccctcttcaaattctcccctctgaaaaatgggtggtacactcaaaggaggaccgcacacattgtagtagctggggtgttgggggtggaaggagcaggttttgggggtgggaggagcggtgagtgatcctttcagcaaagtcagtcctgggcaggagacggcttcaggaatactgtcagctttactggattccaccatcgctttccaggactgtttaggccctgggcccttgaagggtttgcgtgcctcttgtctccattcatacctcaagaactttgttcatgttaattttttttcactctatcatatggaattgagtaaaaaaagaaaaaaaaaaggaagccaacacttacttaactgctttaatgtataggactctgttctgggttgtcttctaaagtacatttcattcaatgtgtgagaatacagataggaaagagttttgctagtttctattttgactgtggatccattgattctttctggttctcagcccttaattgctcagctgcagataccacttgactgactcttaaaagtctttggtttattgcccaattctgggaatatgaaactgtaagctgtttaggagaaaaactgagaccaaaagaaaggagaagtgagccaaactgccattatgattgccacttcttattgaagataaatcaaaatatccatttgactagaaatcaattgaattatgcactttaaatgggccaattcaatgatacctgaactatatctcaaaaaaggtgttaaacacaggcacacacgtacacacacatattggaattccaggaaaagtcactttgatcaacaagattatcagtcgtcaaagtgcttggaagggttctattggaataaagctaaaaaaaatcaaagtaaaatttctccttaaaaacaaaagcaattaagcagcactgtattataaaatatgctaagctgcaagtcaaaattcttaagagacttaagcctgtaagcagtaaggatccactcaatgtaaagttactccagagggaaaggcgtgagcccaaccaaagtattaatgctgtgtaggaggttaatttgactcttcttaacatttttacacaccacattatgttttattcaccatttattattaactgaatttattaaagtataatcaaaataatatttttgagagtttaaaaatattctcataatatttaagttacatatactatgcagggaccgtcaagtaattccactctgacatctgtatttattaccgccacctgtccatgatggtattagaaagatcctcatttgttttaatggatgcctctaaaatccagttttaagagggggttggccactttcaagtttgtgttagttaggattcagtttaacccagctcaacaggtatttactaagtaccagcatatccatagggcgctgtatgatactggaggacacacagaaaagagatgtgtaagaggcactcctgccctcaaggagtttactattgagtggtagtgtaatatgaataaacaaatgaatctgctcaaaagcagggcattctaagcaggccctcaccagcctctcatcattcgcatctagtgtatcttcctccatcactttctaaacgctatggattctgagtgaaaaccaatcgctggtttatgcatgtatgcatatatgaattcattcttgacattgccatgcagagtatttagtataactagacttattatccatttatcctgcctagaagcatactgtaatatatataactctaaaagcaagatcattccttatgttggttcttttgagctggcagggggaaagcagagtatgttggcaggggtctatcaaggtagatgagcccagtttgtacatctttgaaatattaccaatgccaatgtgttagtactgcttggatctcttctatgacaacagttcttattttttccttttttttgtttgtttgttttttgagacaggatcttgctctgtcacctagacaggagcgcagtggtgtgatctcggctcacttcaatttccgcctcctgggttcaagcaattcttgtgcctcagcctacagagtagttgggattacacgcatgcgccatcatgcctggctaatttttgcatttttagtagagatggggttttgccacgttggccaggctggtctggaactcctggcctcaagtgatctacccgccttggcctcccaaattgctgggattacaggtgtgagccaccacacctggcccatcagttcttaatttgatgaatggatagaggtttggcttcaaataaatggagttagtctgtcaatatctgtttcttttaaaatttgcaattgtttttatttttagtgtcatgctatgtgcccttaatgatctagaattaagttctaatctctaccctggtataattgatttctccctgtggactcctaatataagaagaaagatgaagtttttcttttaatgcttttagagatcttcattaagtcatttaatattcttatttgctatttcccagtgtgatggttaagactgagtgtcaacttgattggattgaaggatacaaagtattaatcctgggtgtgtctgtgagggtgttaccaaaggagattaatatttgagtcagtgggctgtggaaggcacacccacccttaatctggtgggcacgatctagtcagctgccagcgaatataaggcaggcagaaaaacgtgaaaggggaaactggcctagcctcccagcctacatctttctaccatgctgaatgcttcctgcccttgagcattggactccaaaatattcagttttgggactcggactggctctccttgctgctcagcttgcagacagtctattgtgggaccttccgatcatgtaagttaatgcttaataaactcccctttatatatatcctattagttctgtccctctagagaaccctgactaatacacccagtgtgttcttttatcaaatagaaaggagatatagaaaacacactgtccatgtctttgattgttacaccacagcagagaatcaatttcttaacctgcttacttatttaccattctccaatggtgccaattctgagatccatcatgactttatcattagaaaaggggatgtaacaaacatgatgagatgttacgggaatactgcttactgcatgatatggtttggctgtgtcctcacccaaatctcatcctgaattttagcctcccatacttcccacgtgttgtgggagggacccggtgggaggtaattgactcatgggggtggtttctcccatactcttctcctggtagtgaataagtctcacaagatctgatggttttataaggggttttccctttcacttggctctcattctctcttgcctgctgccatgcaagacatccctttgctcctccttcatcttctgccatgattgtgaggcctccccagccatgtggaactgtaagtcctttaaacctcttttctttataaattgcccagtctcatgtatgtctttatcagcagcatgaaaacggactaatacactgcatgctcagtatactcaggcactctggaaactaggtttctacttcggacccctgagagaaaagggttatgtatctccaagtgtggtcatgacaagcatcactactgtgtgcagttgggcctgtggattgagccaccttagcctctgaggaaagcagaacctgagagcatgcttaattcagagtgtgtgtgacttggagtgtggaaaggaagatttccagatttgcggtattggcgactgaaaggatggcaatgctattgatggagattaggaagacaggagagaggtagatgttgagcaactccgaggagtttttcctcatacatgttgggtttaaagtgcagggaagatatcctgaaggttattccaggcagaaatttggagctcagaagagacatcagagctgaagataaaaaatttgagagccatctccgtagctaaaagtgtggaacgaatgtgatgactagacaagataatagagaaaaggtatccaaaggcctgaggtcaagacctcttaaaaggctgacttttcagggttttaggtagaaaaagagtcccagcctggggttaaggcagttttttgagaagtagaggtacaaagttccttgttccaaaggaagggtgtctttcaaaagaaaaaggatgggccgggtgcagtggcttacgcatgtaatctcagcactttgggaggccgaggctggcagatcacctgaggttgggagttcgagaccaacctgaccaacatggagaaaccctgtctctactaaaaataaaaattaaaaattagccgggcttggtggtgcatgcctgtaatcccagctactcaggaggctgaggcaggagaatcacttgaacctgggaggcagaggttgcagtgagccaagttctcaccattgcactccagcctgggcaacaagagtgaaactctgtctcaaaaaaaaaaaaaagagagaaaaagaaaaaggatggtgaattgggccaaataccagagagatggacaggagtaagaagaaaaagactaaagatttgttcatcaggagctcattgtttctaaagggagcatttttagtaaagaggaaggaggaataaaatgcagtataatatgttaaatctaagtataatttataaaagagaaaatgggggtggaatattacaaaaaaggaactataaaccagctctttgaggtatttgtcagtgaggaaaacagtggggctctagttcttgatagcaacagcatcaaagggaactttttaaactaaaatattatgaatttttcaaactgaaataatgagagaataatacaaagaaatctcatctgcccataatccaaattcagtagttattaaaattttgccccattgcttaatccattaatctcatttcattttgtcctttttctttgtttatttttggctaaaacattttaaagacaaatcctaaatatcatacatcagtaggcatttacaaaaaaatttcttgataatcacaatgccattctcataccaaataaacttataataattctgtgatatcatctaaaaaacagttcttttctacatcaaaaatgtctgtttatagttgatttattcaatttagagtccaaacaagttccatatattagacattaggtcattaatgtctgtctatttgaatttataacaatttccacttaatttattttctccagcttctgtggagactaggtaagttgttttgtagctgtctggatatatctgattgcttccttgcagtgtcatttaacttgttcctctatcctcagtgtttctgcacatggaagttagcctcatagcaggggttggcatactttagcctgcttaccaaatacgactcccttacatttttgtaaataaaatgttactggaacactgtcacatatgttggggtcatagaaagagtttccgtgtccccaagttataattgcattcacttatattttcttctagtaatttttacccttacatgttaggggtcaatttggaatttctcttcatatacagtatgcaataaagaatggcttttatatttttccaaatgtatattcagttgtctcaacaccatttattaaaaagtcagtatttctcaagtgatttgagatctacccttaattacacagtaaatttctctgtagtcttgtctttttctaatatgttaattctgtaccaagatttgttcatctgttaatggatcaatatcacatagctttgtttatagaaggtgcacattgttttaattctggccatgctatcccaccaaatattgccctttgatttttcagagttttactgtggattcttccttgtttctttttctatgtgacctttagaattaacttgtttaattctataagtaaatttattgataattttattgaaattatgtaaaatataaattggcttaggaagtactgatatctccatgacattaagtcttcatatctaagaccaaggggtgccttttcatttgttaaatattctttgtgtctttcagaagtgttttcaagtatccttatgtgtattttgcacaaatttttatatttgtgcctattggatgccacgtgcagggttaaaaaatattatacctattttatatagatatatatgtatataaaaatatatattatatatagttataatacataaatatattttaatatattatataatatatacatgtattgtatttatatatgtatttatatgtgtatctataaatatacatatgtatgtatctataaatatacatatatgtgtacatatacacatatatacacattatatgtatgtttatacacatataaatacatatataaatatactagaaagtccatggggtttcctagtatacaatcatattgtctgcaaatagagattgttataccttttcctttctattccaaagtgtctaaaagattttttcttagctagtggcattggatgacacctataatgtcttctaaaaatagtagcagtcataggcaccatttccttattcttgaatattcattcatgttacaaagtttataggaatttctgaattattaagtacttttaataggaatgaaggttattgtcattattgcatcaaaattcataagaaagtttggtgtcaaatttgtgctttgtgtgtagtcttcatcacgcttttttttttttttttaaccagtgttaaacatccattacaaaaatagtttggaagtttttctttttttttttcctatgtcctggaaggtgtaagtagaattggaattatttgatctttaagatgtaaaatattggtagaattctacctttgaaagcacctggacatggtgacttcttaataggtgagctctctggaaactttatttcttctgtagtaattggtctccttagactttctattccttctggagtcagatattgtatatcaaatcttctgttaaagttatccatttcttcttggtattccaatttttcacattgagttggacaaatgatttctgatgatgtttaaaaaatttctctggtttgatggttactttgaccgtataatttattttgtgtatttatgcttcttttagaaacttaggtcagctagtggttcctctattttgttgatttttttcctcaaagaactagcttaagtttattttattagttctactagttttctgctttctaactcattaagttatgcctttagctttattaaatccttcattctgctatcagttaatgttttagttcattttctagctttttgagttgatacttaatttattttcatttcatgatataggtaactgatgctcagaattttctcaaagcatcagttttcgctgggccccatagattctaatatatcttactttcattattattatttcctaaaaattcagcaatttcatgttttattttgtctctcattcaagagttgtttaatagacagtttaatttccaggttggatgggcattttgttttgttttttgttttactgtttataaatacttttggccttgggatcagagaatactgcttgtattacaattattactgaatatttttgtggtctaatataatttcagctttcaaaaatgttccatgtatacttgaaatgaaggtttatttacccttataaagatagaaggtaaaatattagctatgcccatgtctatttatcttcttataatttttgcttaatgaaaactaatgatccattatctgctgcataagtatttatgtttgctttctctttattatgccttatggcttttgtgttaaaaagctattgatttatttaatattttggaaggattgaattttaccctatctaatatcaagatcatgactcttgattcctttttgttttcacttgtttaatatatctttcttctatctttattttaaacacaagaagagctttgctttcagtttctattttacatagtctacaatcggattttacttattagtcaatctgagaatacttttaatagatgagttacacaaatacatatttattgataccaacacagtttaattcaagatctgttctattattttatatttattatatattaaattgtcttctttatttactatttattgatttattgaatttattttgctttcaggtattttgtatttttgttctggttgttagatttatgcatacttagtcaactcttcctttataaagcattcattttctactatgagcagtagtaaaattagctagtaacttaattcctgagcactctccagtcctagtcactagtaataacgcagtgttaaactttgtaatattaattatacttaagcctctattacttggtttgtcaaaatcaaatgatatcaatttacttccagcacatacctatgaggtaattgtaagctaataataacttccatggctattcttttctctttttttttttttgaggtggagtttcgctcttgttgcccaggttggagtgcaatggcacgatctcggctcactgcaacttctgcctcccgggttccagcgattctcctgcctcagcctcccaagtacctgggattacaggcatcagccaccccacctggctaattttgtatttttagtagagacagggtttccccatgttggccaggctggtcacgaattcctgacctcaagtgatccaccccatcagtctcccacagtgctgggattacaggtgtaagccaccgcacccagcctctcatcttatttttattacttatatttttctacattattagaagttataatacttatatgcacatttctttagccccaaccccattttttgatattagctctattattaagatatttaatgtccaccttcagattatatgctgatgattctctaatcgtttttggttgtctggagcttttttactgtttattttcaggaagagctcatgataactcttttttctttggtttaaaaatgtttataattatttttctctggactttatgctgagaaatttggctgcatacaaaatctctggcttacattttttctcaagtatttttaagtgattgcttcattattttgtagtataaaatgttgctcacaagaagctggatgccagtctgattttctttccctcattagtgatttggactttttgtctgaatgttgaatttttaaatataaacataaattgcaatacttttattaagatatgtctctgcattgaacattttaggtccgttttcctaggtacatagaatgtcttttgaatatgtagactcaaatcagacttcttgattctcttgatttatagttttaaatatttgtttgggggcgggtgcggtggctcatgcctgtaatcccagcactttgggaggccgaggcgggtagatcataaggttagcagattgagaccatcctggataacatggtgaaaccccgtctctactaaaaatacaaaaaatatagccaggtgtggtggcaggcacctgtagtcccagctactcgggaggctgaggcaggagaatggcctgaatccgggaggcagagcttgcagtgagccaagatcacgccattgcactccagccttggcgacagagtgagactttgtctcaaaaaaaaataaatagggggcggttccaagatggcagaataggaacagctccagtctgcagctcccagcatgagtgatgcagaagacaaatgatttttgcatttccaaatgaggtaccaggttcatctcactggggactattggacagtgggtgcaggacagtgggtgcagcgcaccaagcatgagccgaagcagagcgaggcatcgcctcacctgggaagtgcaaggggtcagggaattccctttcctagccaaggaaaggggtgacagacggcacctggaaaatcgggtcactcccaccctaatactgggcttttccgatggtcttagcaaacggcacaccaggagattatatcctgtgcctggctcagagggtcctacacccacagagcctcgctcattgctagcacagcagtctgagatcaaactgcaaggtgcaagcgaggctaggggacgggcgcctgccattgctgaggcttgagtaggtaaacaaagtggctgggaagctggaactgggtggagcccaccgcagctcaaggaggcctgcctgtctctgtagactccacctctgggggcagggcatagccaaacagaaggcagcagaaacctctgcagactgaaatgtccctgtctgacagctttgaagacagtagtggttctcccagcatgcagcttgagatctgagaacgggcagactgcctcctcaagtgggtccctgacccccgagtagcctaactgggcacaccccagtaggggcagactgacacctcacatggccgggtactcctctgagacaaaacctccagaggaacgatcaggcagcaacatttgctgttcaccaatatccgctgttctgcagcctccgctgctgatacccaggcaaacagggtctggagtggacctccagcaaactctgacagacctgcagctgagggtcctgactgttagaaggaaaactaacaaacagaaaggacatccacaccaaaatcccatctgtacgtcaccatcatcaaagaccaaaggtagataaatccacaaagatggggaaaaaacagagtagaaaaacagaaagttctaaaaatcagagcacctctcctcctccaaaggaacgcagctcctcaccagcaacggaacaaagctggatggagaatgactttgactaattgagaaaagaaggcttcagacgatgaaaattttctgaactaaaggaggaagttcgaacccacggcaaagaagttaaaaaccttgaaaaaagattagacgaatggctacctagaataaccaatgcacagaagtccttaaaggacctgatggagctgacaaccaaggcacaagaactatgtgacgaatgcacaagcttcagtagctgattcaatcaactggaagaaaggttatcagtgatggaagatcaaatgaatgaaatgaagtgagaagagaagtttagagaaagaagaataaaaagaaatgaacaaagcctccaagaaatatgggactatgtgaaaagaccaaatctacgtctgattggtgtacctgaaagtgatggggagaatggaaccaagttggaaaacactctgcaggatattatccaggagaacttccccaatctagcaaggcaggccaacattcacattcaggaaatacagagaacaccacaaagatactccttgagaagagcaactccaagacacataattgacagattcaccaaagttgaaatgaaggaaaaaatgttaagggcagccagagagaaagattgggttacccacaaagggaagcccatcagactaacagcggatctcttggcagaaactctacaagccagaagagagtgggggccgatattacacattcttaaagaaaagaattttcaacccagaatctcatatccagccaaactaagcttcataagtgaaggagaaataaaatactttacagacaagcaaatgctgagagattttgtcaccaccaggcctgccctacaagagctcctgaaggaagcactaaacacggaaaggaacaactagtaccagccactgcaaaaacatgcaaattggaaagaccatcgaggctaggaagaaactgcaactaacaagcaaaataagcagctaacatcataatgacaggatcaaattcacacataacaatattaaccttaaatgtaaatgggctaaatgcttcaattaaaagacacagactggcaaattggataaagagtcaagacccatcagcgtgctgtattcaggaaacccatctcacgtgcagagacacacataggctcaaaataaagggatggaggaaaatctaccaagcaaatggaaaacaaaaaaaggcaggggttgcaatcctagtctctgttaaaacagactttaaaccaacaaagatcaaaagagacaaagaaggccattacataatagtaaagggatcaattcaacaagaagagctaactatcctaaatatatatgcacccaatacaggagcacccagattcataaagcaagtccttagtgacctacaaagagacttagactcccacacaataataatgggagactttaacatcccactgtcaacattagacagatcaacgagacagaaaattaacaaggatatccaggaactgaactcagctctgcaccaagcagacctaatagacatctacagaactctccaccccaaatcaacagattatacattcttctcagcaccacgccggacttaatccaaaattgaccacatagttggaagtaaaacactcctcagcaaatgtaaaagaacagaaattataacaaactatctctcagaccacagtgcaatcaaactagaactcaggattaagaaactcactcaaaaccgctcaactacatggaaactgaacaacctgctcctgaatgactactgggtacataacgaaatgaaggcagaaataaagatgttctttgaaaccaatgagaacaaagacacaacataccagaatctctgggacacattcaaagcagtgtgtagagggaactttatagcactaaatgcccgcaagagaaagcaggaaagatctaaaattgacaccctaacatcacaattaaaagaactagagaagcaagagcaaacacgttcaaaagctagcagaagacaagaaataactaagatcagagcagaactgaaggagatagagacacaaaaaacccttcaaaaaatcaatgaatctaggagctggttttttgaaaagatcaataaaactgatagactgctagcatgactaataaagaagaaaagagagaagaatcaaatagatgcaataaaaaatgataaaggggatatcaccactgatcccacagaaatacaaactaccatcagagaatactataaacacctctacacaaataaactagaacatctagaagaaatggataaattcctcgacacatacaccctcccaagactaaaccaggaagaagctgaatctctgaatagaccaataataggctctgaagttgaggcaataattaatagcttaccaatcaaaaaaaagtccaggaccagacggattcacagctgaattctaccagaggtacaaggaggagctggtaccattccttcggaaactattccaatcaatagaaaaagagggaatcctccctaactcattttatgaggccagcatcatcctgataccaaagcctggcagagacacaacaaaaaaagagaattttagaccaatatccctgatgaacatcgatgcaaaaatcctgagtaaaatactggcaaaccgaatccagcagcacatcaaaaagcttatccaccatggtcaagtgggcttcatccctgggatgcaaggctggttcaacatatgcaagtcaataaacataatccagcatataaacagaaccaatgacaaaaaccacatgattatctcaatagatgcagaaaaggcctttgacaaaattcaacaacccttcatgctaaaaactctcaataaattaggtattgatgggacctatctcaaaataataagagctatctatgacaaacccacagccaatatcatactgaatggacaaaacctgggagcattccctttgaaaactggcacaagacagggatgccctctctcaccactcctattcaacatagtgttggaagttctggttagggcaatcaggcaggagaaggaaataaagggtattcaattaggaaaagaggaagtcaaattgtccctgtttgcagatgacatgattgcatatctagaaaactccatcgtctcagcgcaaaatctccttaagctgataagcagcttcagcaaagtctcaggatacaaaatcaatgtgcaaaaatcacaggcattcttatacaccaataacagacaaacagagagccaaatcatgagtgaacttccattcacaattgcttcaaaggaataaaatacctaagaatccaacttacaagggatgtgaaggacctcttcaaggagaactacaaaccactgctcaacaaaataaaagaagatacaaacaaatgcaagaacattccatgcttatgggtaggaagaatcaatatcatgaaaatggccatactgcccaaggtaatttatagattcaatgctatccccatcaagctaccaatgactttcttcacagaattggaaaaaactactttaaagttcatatggaaccaaaaaagagcccgcattgccaagtcaatcataagccaaaagaacaaagctggaggcatcatgctacctgacttcaaactatactacaaggccacagtaacgaaaacagcatggtactggtaccaaaacagagatatagaccaatggaacagaacagagccctcagaaataatgccatgtatctacaactgtctgatctttgacaaacctgagaaaaacaagaaatggggaaaggattccctatttaataaatggtgctgggaaaactggctagccatatgtagaaagctgaaactggatcccttccttacaccttatacaaaaattaattcaagatggattaaagacttaaatgttagatcaaaaaccataaaaaccctagaagaaaacctaggcaataccattcaggacataggcatgggcaaggacttcatgtctaaaacaccaaaagcaatggcaacaaaagccaaaattgacaaatgggatctaattaaactaaagagcttctgcacagcaaaagagaaactaccatcagagtgaacaggcaacctacagaatgggagaaaatctttgcaatctactcatttgacaaagggctaatatccagaatctacaaagaactcaaacaaatttacaagaaaaaaacaaacaacaccatcaacaaatgggcgaaggatatgaacagacacttctcaaaagaagacatttatgcagccaacagacacatgaaaaaatgctcatcatcactggccatcagagaaatgcaaatcaaaaccacaatgagataccatctcacaccagttagaatggtgattattaagaagtcagggaaaaacaggtgctggagaggatgtggagaaataggaagacttttacactgttggtgggactgtaaactagttcaaccattgtggaattcagtgtggcgattcctcagggatctagaactagaaataccatttgacccagccatcccattactgggtatatacccaaaggattataaatcatgctgctataaagacacatgcacacgtatgtttattgcagcactattcacaatagcaaagacttggaaccaacccaaatgtccaacaatgatctggattaagaaaatgtggcacatatataccatggaatactatgcagccataaaaaaggatgagttcatgtcctttgtaaggacatggatgaaactggaaaccatcattgtgagcgaactatcacaaggacaaaaaaccaaacaccacatgttctcactcataggtgggagttgaacaatgagaacacgtggacacaggaaggggaacatcacacaccggggccttttgtgtggttggggaggggggagggatgcattaggagatacacctaatgtaaatgacgagttaatgggtgcagcacaccaacatggcacatgtatgcatatgtaacaaacctgcccattgtgcacatgtaccctaaaacttaaagtacaataaaaataaataaataaataaataaataaatactagtttggctgcattgctttgattttcttctttaggggcctgttcatacatacaaaggataccatttacctgtcttctatatgactttctcttaaatcctttcattcttttgttttaatttttatcttcacatcctttatttctgtcactgtgctgtccatagagtttgtctgctgtgtgtccttataattaagtctatgttctgaatgtttttccttttttagaaattcagttctaaagtgtttaatttctcgtatttttttttctgttgcctcaccatatcatttctgagttttctgtttctgaaatgtgcaactaactctttccaagcattgaccagattcttcagtctttttaattcattctgaaataactgggctacagtttcatctgctttgtggacagaagtgccacaaagagccgaattgtcagtgcagacccacatgaatcatagatcttaacgaggtttttactaacgactagcaaaggatacaagctaaaaatgggtacaagcaaacacagcatcattcatcactgtaaagactctgaactatcacatggaacttcaaaaggattcttcttctttgctgcaatgtgttttgatttttggagtgatagatgtttgctaactacgcacgtgacaaaaatttgcttagaggaagccatgttagttttgatgctactcaactttgtattttgttagtcatgagatagaaagcctgtgagattacatgcccttcttttagcagctgcatcccataaaattaaaaattccagttttttttaaaccatgaacaatttagtcagacttaatatatcctatttaaaacattcttagataagaacttcctttgttattttgctaatatacaatcccaccaaatgtctacaagaagggctagttaatcaatataccaaagatcaaatctatttatatgaaccacaaatacaaaacataattatacatatataattttatataatttaatttataattatatacattttatagcagcaatcaaaactatcatgtattttgggatgaatttaataaagaaatagcaggagctctgtagaaacaagtatgaacttctattggaagacagtaatatcataaaacattaaaaagaaagctataccatgtttatggttaggaagattcactattgaaaatacatcaattcttgacaaatcggtctataaattcagtgcgtgtccaatcaatatatttagctcatttaaaatgtatatggaaaaggctaagtaccaaagataatcaaatgctcttggaagatgaaaattaaagttgagagatggggtaaaaaactataattcagttctaaagtcataaagctataataattaatacagtatggcattggcatagaaataagcacattgactaaataaatagaaaatacagttcagaaaccaaactctacatttatgaaaaactgacctatatcagaacgagcattgagactacaggagaacagaggaactagtaagttaatggtcctgacacaattgatatctacatagaaaaaaaaacttaatccttctttactctatgtaaaaacaataattccagatgaatgtaggacttaatggagagccaaaactaaaacttttataggaaaacatagaaaaatacctatctcagggtcgggaattaggtcttcaacatggcaccaaaagtactaaccataaaagaaacattaataaagtcaacctttttaaaatcaacaactttaattaaaaaaccagggccaggcacggtggctcacgcctgtaatcccaggaggccaaggcaggcagatcacgaggtcaggagatcgagaccagcctggccaacatggcaaaacctcgtctctactaaaaatataaaaattagctgggcgtggtggcgggtgcctgtagtcccagctacttgggaggctgaggcaggagaatggtgtgaacctgggaggcggagcttgcagtgagctgaaatcgtgccactgcactccagcctgggcaacagtgcgagactccatctcaaaaaacaaaaacaaaaacaaaatcaaaacaaaaaacaaaacacaggttgctggaaaaatggttacttatttttattatgctttataaaatatacagttatattatcaaacttcttttgtaagaatcaaatattatgctgagaatatggcaagaaaaaagaaaacaacctccaccactcataatggcattccctttacccaccatcaactaagtcaggaacctgcgtcactttcaagttttctgaaatgtggactgaaaatacttgtggagggccctcacagatgcatttagaaatggtatgttctggaaaatggaactgaaatgttttagcgagagtcatgggcccaaaccttgaaatagaggttggtggagttttctatagtatgtaattacaacacaataagactcaaaagcatttcaataaagtgtggatggaagacaagatactgcttcaagggcttcattagctttctgcagactggagctctccaaggcatggggaggaaccctgtttacctttggttcagaatcagttttaaccatcattgagggctaggtcagagtgcagcattaagtccttgggaatacactgggtggggaaagaaaagagagcaatgtttttctaaaagcccagaaatgggcttactgtgtttaccagttgtttccaggataatgtattgcagtgccaattgctgatgagatggtaggattatacttcagtccctgctttacatttatttcttaaagaagcttctggtaaattagagcaatagcatcggcttagtttagtgttgttctgttggactaaggatatcagttctatccgtatggtcgggcctaaagcctgggaaatatttaatgaagggagagagggggagagagtgagcatgcaaaagagagagagaaaaacaaataacaaaacaaaaaccaagacatttccctttatagtaagaatgatgaggaaaacatgtttagccatacaagatatcaagataatctcttatttctttcttgaaaatgcaagtacaaatgcctgcaaagataaaatatcctctggatggagtggaaaggttcaccaggcctctgaaatcacgtgaatgatgttgcgctttgctgttaatgaagctcggtgcatttttcatttcagtttctactaagcatttatgagctattacccttcccttccctaaactgcgttgttttttaaaaagccttagaggcattccttctagaaaataaaggtaagtgttaagtggtgataatttggtaataggtgtcatgcttgtggttcataatgtgttaccctacacattttctcaattatccctagaacagctttttgaggatatgaagttagaccttacaaagcacatctttctgctggaaaaatgaggtttatagtggttaagtttagttgcttatgatcacaaggctagagagtggccggaatcaagactcttcaccctgatttcagtgctttttcactccaccattaatatttattgttgataaataatatcaacactttcctaggtgtattagggtcatctagagggacaagactaataggatagatgtatatatgaaaaggagtttattaaggagtattgactcacaccatcacaaggtgacgtcccacaataggccatctgcaagctgaggggcaaggaagccagtctgagtcccaaaacctcaaaaatagggaagctgacagtgcagccttcagtctgtggccaaaggcccaagagcccctggcaaaccactagtgtaggtccaagagtccaaaagctaaaggattggagtccaatgtttgagggcaggaagcatccgtcatgggagaaagatggaagccagaagacagccagtctagtccttccacgttcctctgcctgcttttatcctagccacgctggcatgatgatgacatggtgcccgcccagattgaggatgggtctccatcttccagttcactgacacaaatgttaatcttctttggtaataccctcacagacacacccaaggacagcactttgcatccttcaatacaatcaagttggcactcaataataaccatcacaagtccacaccttgtcaacttgatcccacatacatctccttaaatcatacatgatctccaaatacagacaataatgtcataattacactgaacataatacaactatcgttcatacaaccagaaatgcaccaattcccaaaccaaatgttattacataaagttaacaacacttaaatgctgatatgaagtcaataaatactttttttttttaaaagatggagtcttgctttgttgcccaggctggaatgcagtggtgcgatattggctcactgcaacctccgcctcctgggttcaagcaattctctgcctcagcctcccgagtagctgggattacaggcacccaccgccacacctggctaatttttgtatttttagtaaagacggggttttgccatcctggccaggctggtcttgaactcctgacctcgtgatccacccacctcggcctcccaaagtggtggatcccaaagtgatccacccaccttgacctcccaggttgtaagccactaaatcttatgtcacatgatacaggaaaaagaaaggaagtaaaatgaagatattgtcttagtacaagtgtatacaggcagaaagatgttcttaacaaaataaggaggaaatactcatgacaattacagtaacctggttgctgcaactcatcacatggtcgtagctgttattgatgactaccttcttctacaacccattctgttttccctttgcctctagcaagtacctcagcaggtcatggttctttacctggtggagtgtcccaaaccttcattcctgaagggtctgggccatttgtagtcctgcctggatcgagttgttgtcattttttattgaccttaatcacagggcttggtaatactaagagacaccctaaggaatttcctgtattccacacatgttcttccttaccttcattatggagtagtagactgagttcatcttgataggctaagtcagtcaccccagccaacactaactcctttcttagcctgttgacttagaggtaggaggagcccgagattgcaatcttaatttccagtttaatgaaatcattattgtgtctcctggtggcaacattcatcgccctggaactgagacttctaggccagcagaacgtaatgctgtggaacaagaagcacaaattttactagcgggtctctaggggtgatggtgagtggtgccacttccatttccaccccttgattcctggacccatgaatcctggctatgggagaaacagtaccaaatactggacactgatccggagcatacacagccttctggaaaactttgccccagccctgcaaagtattgtcgcctagttggcattgtaattgtgacttcaaaaggccattccaccgttctatcaatccggctgcttcaggatgatggggaacagggtaagaccagtgaattccatgagcatgagcccactgctgcacttctttagccataaagtgagtgccttgttcagaggcaatgctgtgtgtaatgccatgacagtgggtaaagcattccataagtccatggatggtagtcttggcagaagcattgcctgcaggataggcaaacccatatctagagtaagtgcccattccagtgaagacaaaccactgttctttctgtgatggaagaggttcagtataatcaacctgccaccaagtagctggctgatcaccccgaggaatggtgccatatcgcggcctcagtgtttgtctctgctgctggcaaattgggcactcagttgtggctgtagccaggtcagccttggtacgtggaagtccatgttgctgagcccgtgcgtaacctccatccctgccaccacagccactttgttcatgggcctattgggcgatgacaatggtggctggggaaagaggctgagtggtatccacagaacgagtcatccaatccacttgattattaaaatcctcctctgctgaggtcatcttttggtgagcactcacatgagatacaaatatcttcacagtttttgaccactcagagaggtccatccatccacatacctcttccccaaatttcattgtcatcagttttccaatcatgcttctttcaagtccctgaccatccagccaaaccattggctacctcccatgaatcagtatataatcacacatcttgccatttctccttctaagcaaagtgcacagccaggggcactgctcaaagttctgtgcattgggaagatttcccttcactgctgcccttcagggatgtcctagaaaggggctgtagtgctgcagctgtccacttttgggtggtgactgcatcatgcagagccatctgtaaaccaggcccttgtcttctcttcctctgtcagcttatcatagggaactccccatgaggccatcagtgcaggctgggggagagaaggcagggtggcaggagtggggaccatgggcatttgagctacttcctcatgtaaagtacttgttccctcaggacttgcttgagcctgatcatgtatataccacttccatttgatgatggaatgctgctgtgcacaacccactttatggctagatgggtcaaaaagcatctagttcatgataggcaatttaggtagcttggtgatttgatgacctgtagtcaaacatacagtttctaccaaagcacagtaacaggccaagagttgtctctcacaaggagagtagttatctgcaggagatgcagggccttgctccaaattcctagaggcctcccctgtgattgacctataggggcctgccaagggctccaaacaacatccctatctgccattgacacttcaagcaccattggatctgccaggtcatatggcccaagtggcagagcagcttgccaagcattctggacctgttgcagagccttctcttctggatcccactcaaaactggaagcctttcaggtcacttgataaatgggctggagtaacacacccaaatgaggaatgtgttgcctccaaaatccaaataggcctgctaggcattgtgcctctttcttagttgtaggaggggccaaaggcagcaacttatccttcatcttagaaggaatatcttgacagaccccacaccactggacccctagaagttttactgaggtagaagttccctaaattttagtcaattttatttcccaacctctggcacacaagtgtctcaccaataaatccagtatgtttgctacttcttgctcattggatccaatcagcataatgtcatgaatataatggaccagtgtgatatcttgtggaagagaaaaactatcaagatctctccaacaagattatgacacaaagctggagaatcgatatacccctgaggtaggacagtaaaggtatattgctggccttgccagctgaaggcaaattgcttctgctgggccttatggacaggaatggagaaaaagccatttgccaaatcaatggttgcataccaggtaccaggagatgtgttaatttgctcaagtaatgaacccatatctggtccagcagctgcaattggagtcaccgcttagttaagcttacaataatccactgtcattttacaagatccatctgtcttctgcacaggccaaacaggaaagttgaacggggatgtggtgggaatcgccacccctgcatctttgaagtccttgatggtggcactaacttcctccagggatgcaatgttgtgtttgatttactatttttctaggtagaggcagctgtaatggcttccatttggcctttcccaccataatagccctcaccctaccagtcagggagccaatgtgggggttctgccagctgctaaatatgtctatgccaattatgcattctggcactagggaaatgaccacaggatgagtctgggacccaccagccccactgtaagttggacctgagctaaaattccattaattaactgatctccaaaagcccctactttaactggaggaccacgtgatgttttgggtcccctggaatcaacgtcagctcagagccagtgtccagttgtccctgaaatgtctgattatttccctttccccagtgcacagttaccctggtaaaaggccagaggtctcctgggggaaggatgggagaaagagtcactgcataaattgtcagcaatgtagtggggtccttcctcaaggggacccagcctccccttcattcaaggggttctgggtctataaactggttcaagtctgcaaattgattgaggggccgtgattctttgtataatttttaatttaaattagtcttttgtctacttgacctggaagttttctgcttatataaattaagcaagaatgcagtaggcctcttgtcaatttcactttttaggaacactgagattaagtagccaatgccagagctctacacaagtcagactattctgattgttgccttgcctccgctgacctttacggtaattgcacccaccttgccttgatgcttgagtgccaccacttggcccatgccacctcaggatccaattattaccattgtatttaaattttgtagttgaatgactgtggttcccactataatatctagcatgcagagaagagcaatcacagagctcttcaaggatgcaggtgctgccctcacaaatctatttcacaatgtgctggtcaaaggtatatcttctgtactctcccagctgggatgagtaggactaaagtgacgaattcactccaccatcccagtctccataagcctttggatcccttcctctacattaaaccaagggagatcaggcatttccagctcactcacagtgggccaccttttgatctatatttcagctaaccaagcaaataaactattagaaccttttttaactctccaagctgcaacattaaatgcagaattcctgcttagtgggcccaaatcaatcaattcagcctgatccaactttatgttccttctaccattagcccacacccttaatatccattcccatgcctgttctccagatttctgcttatataaattagaaaactcaagcagttcttttggagtgtagcgcacctccttgtgggtcacattctgaacctcatctctaaggggcctgccgggactttagtctagttctataactataagcaaacaggggtattgagggtgggtccttaggagaatcaacatcgtctttcctggcaactgcctcaagggaggtcatcgctgatgccttaggcagtgcagggttaaactcctcagacaaaggtgaaaagcctgatggcagcgcaggtggaggaggggatgttgcctcccctctgttgcctgtttcctctggtaaaaaagattcatcagaatttagaagctcagtgcccccagccttatcagggtcctcccgcatggccccattccaagttgcagggtaccattctttttcaatcaatgctgtcactttaacagtaaacacctggcaaggctgtgcacgtacctttcgttgcaggtcagccactcacatgataagagcttgtgtctgattttccgcaatttcagctctttctctacaggagataagactcgaacccagggcaatcttagaagatttgaggctcagaatgtggttctggagctgggagatagaatccctgagttcatcatttttttgttttcatcactttgattagtgaacttaggagcaaccaactagcttcattatattccttggttctccacatatggttaaaggtattaggtataaagtcactaaactccttgcctctcatgagcagtgaatcaggagtatcagatgcatttattttgcataactctctacacagttcacagcaaggactatcagtgttctccacactattagaagtagagtccctagcattttggcgtctaatcatatttagcagccaactccagaaaccccaaaaccatctaaagaaatccatccgtaaaattctgttcctctagaaccactcctggtaccaaaatctgtattagtcaggattcgctagagggacaggactcacaggtgagatgtatatataaaaggcagtttattaaggagaattgactcacacaatcacaaggtgaagtcccacaatagtctgcaagctgaggagcaaggaagccagtccaagtcccaaaacctcaaaactagggaagccgacagtgcggccttcagtctctggctgacagcctgagggcccctggcaaaccactggtgtaggtctaagagttcaaaagctgaagaacttgtagtccaatgttcgaggccaggaagcatccagcacaggagaaagatggaagccggaagacttagccagtctagtccttccatgttcctctgcctgtttttgtcctagccatgctggcagctgattagatggtgcccacccagattgaggatgggtctctatcttccagtccactgactcaaatgttaatctcctttgacaacaccctcacagactcactcaggaacaatactttgcatccttcaattcaatcacattgacactcagtattaaccatcaccctaggctttagggatatagggaaaaacatgactcattgctgttatctgagagtacataatctattggaagaaaggaaaacagttacatgtaaggcttatatcagtataaattagataactgccaagtgagagaggtagaggtagcaagtgctgtctgtgggtgcatgttaactcagtcttaatcttggaagaagtggcagtgtggaatggtacatggagaagcagaagggacaattactgtgagcagatgaatggctcactacaggggcatgggaagaagatgcaagagcagtggaatctttaattgacgaacctggtaccaagctgccaagtcttagtctcaggactggcaccgtgcacttggccattgaaaagactttggaacctgtggagtgaagagttgtaggaattttcaaagcctcagtgtaggaacaatgtgagaatcaaccagggcatggtactccacactgtgttcagatccactggtgttaggggagtcccagagaggcctcttagagggttgaggaggatgggatcaggcatagcagagactagggacacgaggctctgcggccagactgcaggtctgctaccaactacagtgtgattttgcctagtcacataatctctgtgggcctcagttttttgttttttgtttttttctattacaacagtacctttctcgtggagttgtagtgattagatatctagtaccaagactatgcttgttagcactgagtaagaactcaatgaaggttagctttcattggtactatattactattgttagtgttggtggtggagctgaatcgcctaacctatgaggttggtgctgaaatgaagaaaagaataacagtgttttaagaagtttggtcactagaagtggagcttagtaattaaagaaaaagagtgaacacttttaccttcttgtggaagttagtaagtctacaaaatgttaattctgcatttgaatgatcatttgggagactcttattgtcctatttgcactgaaaaagtcactgaatcattattttagaactggaataacacctgagatctaggccagcactttgcaagttgtgctctatgggacttttcatggaagtggctgaggagttgccttgaaggaaggcagagggagtgggtcttgggacacccttccagttataaaacaggacgttgattctgttttgtagttgcagcatcacatataatttcatttattaagaggatcccacttctaaaaataagttgaaaaccagtgatttaatccagcctctctgtttgcatatgaggaaatggaattccggaaaggttaggtgatttgtccaaggttgcagactagactatttattaatagagtagggtcaggaacaaaagcctgctccttgctggtccagcgcctgttactagttacataatgaatgctacctattgctgcacagtgccaaatcattgcacttttcagattttactctaatcaaaagaaaaaaattaaagtgcacttccaaatcagtacttatatgcaagagcttcaagaaacaaactagtatttaacttggtggttacatattgactgtattttcattgagtgaggttagaagagattgagaagcgtgaaatgaagttacaaagtagaaactatatggtgaactcaaggcaaagattgtccatagtaaaagaagacaaaataagaatgaaagagacaaaagaattgccaatgagttgtaatcttaaaagaaagatatatttaataaaataggattgattgttttgaatgtgggctgagaagtcctgccatcttccattgactctgctcacaggccttgtttgtgaactggcttccatggatagcattactctcctgacagctgcagctccaaattcagcatgaaaaggctggcaattctaagaggaagggagggtttaggccacttttaattctactttgtcattgcaagtttcttgcattgtttggcatttgttggtcttccttactggatttcaaaactagaacactttttcctagccttggaaccaaccacgaaaataaccacctcttaccctcatgaagaacactttaagtttttctcttttaaaaatgaagtctggaatatctccaaacatcttgtcactcacgccttcatttaaatgtcaccctctcaaccacaaggaaactaaaattgccccctacttgctactccctgttttattttctagtagaacatactacagttggagatcatctcatccatgtcttttattcttgtctcttatttgcctctgcttgactgtaagctcatggaaagtaagggaccttcaccaactagcaaagtgcttaggacctagtaagaacctggtcaattctaactgagtgaatgactgaattcctgtgagaagtcaacatgaaaattcctaggtcattagtttagttattggaactccaacactgtattggaaaagtgtcatggaaaggatagttagtggattaaggttttttataagaggaagagggaaagaaaggcattgtctttacttcaggcatttcaatggccatgatggagcctaaatattgtatgttgcattttgttttggttttgtgtgcacaagagctttgccagtggaatgaacgggttaagaaatgtgagttttcttttcgtcctgctatagagacttaaggaattgccctgtgtgagttccttgagggcagagaaaaatacaaatccatgaatacctgaaagccctgatttggcccctaagcaatctatgcatgtaacaacattgcatttgtaccctgtacatttataaacattttaagaaaagtataagagaaacacaaattttggttactcctctctgaaaactgctctgatgtcgcttggccgggggaattaagacctcttcctgtggcctgtggccactatgtgctcccggctctccaggctcatccagggccactgtgcctggggtcacagggttccaggatgtcaaccttctttcagcttctctgactcctcaagcatttttttttttttttttttttttttttggtttccaagacccaaacgcatgtctctcttcttggcacactcttcccaacttttttcctggctaattgctagttatttagtttgagattaaatgtcactccctcggcctggcgcggtggctcacgcctgtaatcccagcactttcggacgccgaggcaggtggaccacgaggtcaagagatcgagaccatcctggccaacatggtgaaaccccgtctctattaaaaatacaaaaaaatttagccaggcgtggtggcatgtgcctgaagtcccagttactcgggaggctgaggcaggggaattgcttgaggaggatattgcagtgagctggatcgcacctctgcactccagcctggagacaaagtgtgacaccatctcaaaaaaaaaaaaaaaaaaaaaagtcactcactcacagagggcttctcagatactcccctgccccctcatttaagttgcaccgcttgttgtattctcttataagccccattctttttcttcttggcattgatcaaattaacagctttattttattttagcattgtgagtgtatatgtgtgtttaatgtctgcttcctgactaaactgtaccctgcaggaaggcaaaactgtgtctgtgttgctcattgttaaaccttcagcactgaactcagtgcctcgaacataggagattccaactcaatatttactgcgtgaaggaatgaatgaatctttatgtccctcgtgcctaacataaagtctgccatatacaatggactaaaaaatagtattcagctaaaactgagttacggagaagatgaagtattaattgtattttttacagagaaacaatggtcagtgtatcaaaaatagagaccctgctctcagatatataacatagaactctcttcattcatttgccttcattttagttaacagaatctgttcatctaagtagagcagagaaaaacttcataattgctgtgtctgtgttattccaaaacatttaaacaaaaggtgaataactgaggtattcttccctgtggtacatacttgatgtgggcattttaaaagattgatcaaatctcctttcagctggatatttgagtaggcacaaccattacagaattttcctctagggacttactttagctcttaaactatgtaaactgaacaagcaaactcaagtggatcattatctatagaagtatagaattccatctccctttggcaaaccattcaaacccagaagtgtgttttacacattctgacagaagcatctgtaataaccaactctaacctcctttcttaccactttagcacccaaaagtataagaaaagaggacatgttaaggcttgttctatttattagaaaatatataaagagttcttggcttaagaactcttctggctatcagctccctgatgtgaaaaaagtaaatagcaaggggtagcatggagtcttactcccgtgtgacagacagcttaagaaagacaattggacatcatgtgactacatgattcaagctaaagtccagacacatcttttccataggccaattgaacattttctctgtaatttccacaataaccatttgcaccagcatgaatggagagggtctgagttcttctgggtgagtaaagggtgtgtcagttatctgtcctctgtcaccaggatttagaggcaggctcatagtgactcttgtaaagttgaggttcgcctgtggaggctgcaaaaaagagggaggaagagagagtgaggttcctcttggctctgtgccagggatgtgattagaggaccctgggagggccttcatcctacgaggggttggaagtggaaatggatgtgtgtggatgacctggtaacgtgtcacagccccttccaccccatagtagtcagggatttaatgcctcaacaaggcaggtctctgaaggagactgacttttctctctctctctgaatgatactgcctgagagaaatactcacttcctgctttgttttcaacaagtatggacttccttacacaaaaagaatcttttttgcttttgtccccccatttcactggaaatctatccactgggcaccactgttggtcggcttcctttcatagattcctttatgtttcaaattttaaaaagacaataatagcaacaaagtgaaatatggatttaagctaggaaaagcagagaactgaaacttttttcctgcaatcatacttcccagcttcttcagcaagatctgcttggctgggaacatgccttctgagaactttacatttctaaactgctgctaaattgctccatgcatttattcctcaaactctcagggaagatagcactggctttcagtctcataccaaccattcttaaggtaatggaccaaaagtcatttccacttgaaatataatccttctaaatgaatcatgcaacatggtttttacctccattttttcagaataactctaagatgatgatcctctggccatattttaaaaatttctcttatttgttttaattttcttccattttttctttaattttgtatccagacactgccttctctaagaggaatgacatttttgcgggttatcatgatatatttttagcccatttgccttgacccatagcttacaacagttaaagaacactaacatataaacatagagttttgcccaaggccattagctttgcatgttaacaagtgggcagaaggaaggctgggcatgagagagacatgctgtccttctggtgagatcatcaatcccattcttgtaaccttcagatcattgcatttgttcagaatcgtctgcagaggaaaacatctcaaagttgggaggttgttgaagagtcagaaacaaatgggtcctgggtaatttttcaaaacaggctttttgtcaattgtcagtcagctgtttaatattgtcaattgtcactcagctgtttaatattgtgctttgttataaggataggcactgtggtctcagcgttcttaagcttttacatttccgttatttggttttacttctgcattagtagagtagatgtagagtagatgccacctctaggaactctaccagcagcagcatcttagactagaagctccctctctaggactataatctctgtagcctccacttctcccaccccttatttcttctgagcctacttggtctttgatacttactataatactttctattctcttatcataaacagttttctgatttcattttcctctggtttcatactaagccccataatcagtcactgcaagattaccttctagaatttctgtgccctcaagttttctccatatctagagagtcagtcatctgccttgagccacatccactgtctactttcttcacttccatccccaggctgcccagcactgatgaaaacaaaacaaaaacaaacaagcaaacaaaaacaaaaacaaaaaactgactaggatctcaatctggtttgcaaatccatgcttctctttcttgacttctttagacatcaacagaattgacgcctcctcttgacctgggacacccctcctccttggtgctttcttctacctccccctgcttctctgtatgtcttttgcaggctcatctttctcttaggctgtcttcccccatctctcctctccctctgtgcactcaggcagtctcccttgtcaacccccaaaactgcttctccagaccccagtgtttctctgagctccaggtccacaattctctaaggtccatgtggatgtccctcaccatttcaaacttctcttccacagggagtccctggttttcactaccatagcatattaaaataccatgcatttcccttcataccactaattacaactttgtttcttttttttaaattttatgttttaaaaattatcttctgcccacatatattgtaagctccttttgagaaagacacattgctgtcctggtcattactatattcttatcaactagcaggggccgtggtcggggcttgtgttagtccattttgtgctgctataaaggaatacctgatgccaggtaatttataaagaaaataggttttatttggctgagggttttgcaaactgtacaagaagcatggcgccagcatctacttctggtgaggcctgaagcagcttttactcatggtggaaggcaaagagagagcaggcgtttcacacagcaaaggagagagcaagagagatgccaggctccttaaacgacctgctctcccataaactgaaagagcaagaactcactcattacggtaggatggcaccaaaacagttgtgagggatccaccccgaacacctcccaccatgccccacctccaacactgggatcaaatttcaatgtgagatttggagggaacacacatctaccctttatcagtgctcaataagctcgctgaatgtagaacagtgatataaggcaggggtgggccaagtataggcgacaggacaaatttggcctgctactgcttttgtaaataaagttttatttatttacaaaataaataaataaatacagtcataatcattggttacattttgttcaaagctgcttttgcattaaaacatcagagttgagtagctgccacagagactgtaatggccccacaaagcctaaaatagttaccccgtggtcttttacagaaaaagtctgatataaaggacagtctcacagcacagaggaaaagcatataacccaaaggaggaaagagtagagcatagtggactgcagagaagtttccctggacccaatctgtgccttgaaagatgagaaggacacctccaaaggcaggatgggggtgaggtggggtgggcggtggtgatccaagcagacagcacgggcaagtgttctggaaaacttgcctttgttcacaagtatcctgcagtataaattgcaaggtgggcagtaagaaatggacttgaagagattgaacaagggccagaaacccaaggacattgctaaggagtttgtgccttagcccatccagggccctagcagccttgactgatgcttctgaggtcctggaggctccaggctcaggctaccttcccatattctctgaaaataatatcacatttgtttagtaaaaaaattgtttactaaaaaattaacctctcagaatttctgcattcacatttatttcttctcatatcctcgagttagaaaaaggtatttctctcctgtgatgatattgattctgcactcatctattttcattactgtctccttccctccctccctcagtccctcccttagtctatctcactctaccatcttttcctttggaccttctgacattcaacatcttggtcgctcctatccagccacacctctgaccattcaaccatttgtcctcttgattggttccaccttgtcctatcacgctggatatgctgttgctcccaaattgcctccctctgccagtttcttgccccttcctccttctgtctctccctctctctttcaatctttctctccctcagtctctctttctctttccctctctctcaatctttctcttcctcagtctctctcccattctctttctctttctctcaatctctctcttcctctctctcttatcctctctttctctcaatccctctctccctctttctctctctcaatctgtttctctgttaatctctctttctctctccttctttctgtctctgtctctgtctgcctctctctctctctctctcttccctagtgagctcacttgctttcccagtttcagtgatttctattcagatatctccaaaatttgtatttccggatattttatgctttcatggaggccgtgtaaattggtataacctttttggaaggcgttttggcaatacttagtaaaaggttaaatgtttacaccccttgattctgctattgtatgtgtaaggattttttcctgcatacttttgtaagtgtagaaaatatatgtataggaataattgcacattgtttgttgtagctgaaaattacaaataatataaatgcctataatcagagcagttaaatacatatgaacacagtgaaataccaggcactcatttaaaagatgaggtatattttaacaagcctatttgaaaagatacccaatcttagcaagtgaaaaaaaaactcatcaaattgatatatttagcgctgtccctctctcaagtttcagacccacattttcaattttctgttgtcatcttgacttagtctcgtgaaattttaaactaatcatttttaagggaagatattttcttcccttaaagatgaaattcagacaaacctctgaatttccctctttctgctaatttcttgctttcttttatcatctttccatccatcctaacatacagttccagaggagtctttaaatccttccttattgcctaacaccgaggatcatttgctgaaatcttgttgatttttccctcagatcaacaaaggattttcagaatagccctgatttctctttatcaccacggtgctgtctcacgtcttctctccccctcctcctacctgccgtctcttccagactcgtctctctcccccaatctcctttgcgcactgatgccaaattagtcacaacaaaagtgtttacgtgatcgtgtcacccactggtaagctcttaatggtcttcccttacacattatctcccatttcatctcaggagccttttattaaccactcttcacagtctgactcagccctctttgccagtttctctctttacaaatagcaaagtctatgagctagattactcaatattccctgaataggtcttctcttctcccacctcttggcctttccagtaccattcaatcttcctggaaattcctgaaatttctttcctcctcactcagtcaatgttttgagacccacatcaaatgctacatactatttgttcctttactgatcatgccagttggaaatgattcgaatctgtaaagcagggtgctatggaatgacatttcttatagccctttggtcatttgggagcaatgtctaacataatatcctccaggtccatccatgttgttgcaagcgacaggatttccttcttgttaaagggtgagtagcattccattgtacatatattccatattttatttttttttgctcatctgttgatggtcacccaggttgattccatatcttggctattgtgaataatgctacagtgaacttgggagtgcagatatctcttcaacatattgatttcatctcctttggatatatacccagtagtgggattattggatcaaatggtaattatatttctaattttgggcagggtcctctgtagtagctccataatggttgtagtaatttacatatccaaccaagcacgccagggttcacttttcctcatgtcctcgccgacaagcctgatattcttatttgcctcttagcgcttcagcctttccctcgtgacttaacggtgactcccttgagactacttgaaataataagtttggatggcaaggaaatacccttctgctgtcaccctttgccataagactgagttactttgtaaacaaagaagatttacttggtcttccatgcccaagacccttttacttttcatcgcttaatatttcatggccaaaaactgttggttcttccaatcttgtaaggccatttatctttgatcttgctccattcccttccatttttgcttgagaatcattcagttcttgcctgatctcacgtctttctcgcaacaccttactaatgactgccagagtgtccactacacactatcggtctcatttgaccacttccccaggcatgtagcctacctgccaagttctttcacagcagatattttgcagtgttgtaagagggctccctagcttgctatgttttcttactacctggcattaggaagtaaacatttttcatggcagtattcacttctagtaccaatttcttttttaatctacatgggctaactgctgtatcaaacagccatcaaatcccaatgttaattgcaacttacagtacgttgtgatgtttctgtctgtatactcattcagacacacagagtttaagtaatttgttcaagatcacaaagttagtaaatggtggcatcaagatttgaacccaggcagctggactcaagagtctaaacaactttcattttaaaattttcatctttcaagatatatcacttacaatttccatcttcatcactttcttccatacttcagagctgcatatgtaaacctcttgatcatataaatatttatggagtctcagcattttgagcacatgctgagagattttgtagcattgaagataaagaagctctttcaatacatctaatcttgccactattgattttgaacagcatcttaatttgttacctttttaaaaccatattgtacttttcttcaggacagctaaattaaatgtcttatgttgatcccctgggttttctcagtttccatttatcagtttccttttatataaagagatgctaatgggtaaccttacattttgtaaggcatatttttgaagatatacaagtgaaggtttgatctgtacaccctcgttagagctctttattttacatgtggaggaagagatgccttagggcttctgaaaaacaggcttttatttttatagaggagaaacttccagaacatgccatgagcaaatgctctgtcaagtctggttctttcccccattacttaagtgcaaatggaccacatttgaagaagataagtagcagaacaaggctccccacaaggggattttgaggtgctctgaaaaccagactgacataatccatggaggagttcatcactgcaggctgtcacgtctcacagtgggagtcataggctggtctgcttgataaactactcctgatctatgactggagctgtgtgcttcctttaaaaataaatcttgtttttccatgccccacgtgcttctcagcctcaggagcacctcatggatttagactaatcttgtcttttacagtcatgttacttccagattcctaggaatcaccccatttctgatgccgttgatccatccatacccactgaaattgagctaaatgctctagtctgatttgccccttgaagttagtatagaatattttggctagactttgaaaatgaagccctgaccacaatgcataatgacctcagtagacactgaagagttcctttgcatcaggcaagtgacaagtatctatctcatcttcaaagtccacatagatatgtgccagattgtaggttgacaaatcactttttcactagctcacgtggcaagccttttcaccttgtaataatgctagtgagagacccataggtaccacataattggccagtcattgagattcaagcaacatttggataatttagcaaaactatcatcagaatcatcaaagtacataatttttatttattatgcaaatagtggattcactaaagtgcttagaccaattaagttgctcccattgaaaaacagggtgattttattcttaagaatatatcaggataaacttcttgtagcctctaaacagtactgcttagaaaagtgcagcttcactgcattgcatatccccccagaagccctcaaagttcagatgtacaccacaaaaacatgaagcacatgtgtttgcatggaaggtaggctctggggtcttcctatcataatatgtctatgattaatagtcaacatatgccccctccacattccctaaaggaacatacacatgcatacacacacacacacacacacacacacacacacacgtgagaactgaattgagagtttggggtatacaccatccctgagggcacagtctacagctcctaatgtgtgctgtagagcaagcattatattgttgacaggtaataattcctggttaggaataacaggataccagtgagaagaggctgagaaaaatacactcttgctggaagagtcaagaacgagctcttcgtgggaaactatgggagacgattgaaaaaggacaagaagaaaggagaattgttaagtctccactttctcagtttctgaactgaacttttgctcacagcaggtgaacacaggctccctcccacactgagacttcctcccctgccggtgtgcagtctgttaagtaaacagagacgttatactgagaaaggaacatttctctattttggctatgagttgttatttttaaagattcatcctccaaacattttcccctatccttgtttattttttcactagaaagaagatgaactgcttaaaaaaaaaattcaactccatgacaagaaaaacccacttctagtatgttctccccactcaatgccaatggagcctttggtgtgagcactctgccagccacacattgggcagcatacctcttgaaattcctgctgtgcttctatagagcttccatgcatccagattttcaaagtcaaagcaaaatgcgcatggcagtttttttctgactccttcaagttaaaaggccaacctctcccttgacatatccatgtatttatcagtatatctataggtaatacttaaaggtgatccttactgtgtgccacactccattctaagcactttacataaaaaacctcatttcactttatttgggaataggatgacaatttcttcaatattgagatgggttgaatctggggagactgatgttagatgcaaaaagctttctttctagaacttttcctgtgtcttgcacctggctttctccctgtcttgttcccattctagatctctttactgacagtgcccatggctttcttcttggtactctagtgttgagcataagaactagtatgtaataggctctcagtaaatcttgttgaatgaattaaagtagagcaagaattaaagacagagaagaagatcttcttgttggagttctttcttttggttgataagcaatgtgatttgacgtaacaatcttgagtcctaatcccctcatttggaaaatggaaataataatgctaatcttagaggtcacttctaagaagtatatgaatatatcagaagtaatcaacatttttaagtcaaagaaaagaacgtctgtgaaaaagaaaactaatgagctagttgaaaaaatattaattggatctttttctcataccttacgccaaaataaatccccaaaaatggttgcacaacattgtgaatatactgaaatccattgaatcacactctttaaatgggcaaatgttatgttatgtgattatctttcaataaaattgttataaaaatgaataaaccccagaagatcaaaaatttaaacataaaagcatggaagtatactagaaggaaatataagataattttatatgttatgttgtatatatttatatgtaaaatttttttatttatttttctttgcttttaaaagcaagacataatgttctagaggaataaatgaaacgttcgataaatttaattctctattaaatgttttgcagaagaaaataccaggaacaacatcagaagaaaaaacaaaaaaccataagaaaaacaattaaaaatacatatgacaaatggcttattactataatatttaaagaactcttaaaaatctatgtgaaaatgacaaataacagaaaaatacgtgcaaaggacaagagcaggcagtttagagaaagcctataccaatatattctcttatcaacagtctattgtacaagctatttgaaagcaatgtttgaactatcaaaatttaaaatacataagcccttttatctagcaattctacttccaagaatttattctatagctatctgtacacatatccaaagacataaacataaggatagtcattgaatgaaatgtttttaacaacaaaatacttgaaagcaaagaaatgtcacccaagaaagaagtgattgaagaaagtttagcattcagttcagtgaagacatattgagctgtcaaaaaaagttgatggagaactccaaggtctattaactaaaaacaaaacaaggtgctaaacaatatgtttagtgttcatattttaattgtttatatatttcacaaatatatatttgtgcatgcagaaaatattttaacttctttctaaccccgtcaaacacatcatgccaaaattcaacttgtgataaagaaaaaaataaatgaattcctttcgtgtgtagtatctcatttaaattcttcaacaacccaataaaaaagatacagacacatgtttttaagtactacatgttatgcacctttggtttgcttatttaatagttgcaactactaatgttaaattcttgatgccaaggttaaaagcctgaacttctaaaaatatcaagatctgacatttttctgttttcacagattaatctgccatctcctgacctccaacacactgctctatgttctttcatgctgctcctcctcccatgtttaggaccctcttccaaggaggcattcacatctctgcttgatgaaaccctacattatcttaaagcgtccactcgaatgccacctacttatataccatctcctgcaataccaatgggctcagcccaaccatagcccatagttattgtagttgttcttgtacttcaaaagcactacaaaacacaaccatcaggacttgttacattatttgaaggctatgagcatcttcagccgaggccctgtttttattcccagaactaccacattgtttagaatatagtagcagatcaatatacgtgtattagataaatcgtttacccagatcttgatcattttcaattacccataggttgaagaactccatatttaacatggcagacttgaggactgaactacctacctcttctaagaagttgaaatgagaatgttttattgatgggaaattatttttttgttttgccttctagaattcaaatgaatgttcatattccatgaagacaatggctgatagttttttgttaaagatttagaaccagtggatttttatgaatgtgaaccctttcatgtcttgtggaagattttctgttttttaatctttttatttatttatttatttttgctatgttttcataggaaccagggaaaatgtgtagagggcatggtggagatcttcgacatgctgctggctacatcatctcggttccgcatgatgaatctgcagggagaggagtttgtgtgcctcaaatctattattttgcttaattctggtgagttgataacacaagataactcaatgctggatgaaatgtttatttgtagttttcaaccagatacgatctacccactccaaaggcataatgtcataaatagaaagaaactactgacacacgttttaaaataacctaccaacattgcagattccttataaaggtagaaccatgctagccaaatagacacatgaaaaattgtaatttggcattgaatcaaatggcctttgagctaaaatttttgtatgctttcacagataggatgtttttattcaaatggtacatgtatatagacatatgttagttgatagttatattatgtctgaaaataagtagaccaagtaattctgttaagaaattgtgaccaattccaggctccagatagtaaagaaagagggttatttgagacagaccatgtttctggtcaaaactgactagctaaaaatatagttggcttagagatagaaaaacctgtttctaaaacagaagaatgtggaatgcaataaattgtccagctgaaagaacattttccatttgctctatgaagtctgattctactgccccttcgtatttatttgtttgagaaagcttagctaagagcaacatctgttttttgtttttgtttttgtttttgttttgtttttgttttcaatgtagtgaggctggctgttgtataaagagttactctatgtcaccaagatggaaactatggttcagcctgaattagtgccctgactcctcctagcctcttggtatttggatctaagctctagctctacagcctctgggacctaaagctcacattgggtatcagcggtacagcagctccccttaagctccacctttccccctggctctaaccccactttgtgcctcatccctcattctcacatagaaatcatagctatttcgaatctctgggcctgacttagtttcttatgccattagacatagtctcaaattcctcaatagctgaattgcagcttgtattgatcacatacatagagaatccgcacttccttctctttccacgtgtttttgtctctttctgatgagtgctgatcccttcccgcttcccctaacaattttttacttttcttccccaccactgctaggaacctgtgttgcttaatggaatcagcccttccttctcttttcttgtgtttttgtctctttctgatgaatgccaatcccttcccacctcccatgacaattttccacttctcttccccaccaccactagtaacctgtgttgcctaatggttatcacagtaatcattctcacttatcaactaataaatggaaatctgtactattacactaggcaaggactgaattacagaatgaagtcccatgataaatgatgtgatccacactaaggaagtgattaccactccattcaggtttctgtttccactcacgtgcattgtgcttttcatttcagtcgtttgtcctgtacattgtagggtccagatcccacaatggctctttattggatgagagttctgggagcagtgccactcagctacatggtgccaggtcctgaacctgtgccttcttcggtggagggctggcacgtgctgacagctttcatgtgggcaatctgggaacttcagagaaggcaggcctattaagtgttaagactccccaccccgaacttttactgagaaaaagtaccccagacaggaagtaaaattagccagagttgtatgatccacacagtggatgctctgatctcagtaataaaaaatatttcctccagatccatatagacttttcctgcattattgttttgtttctgttcctatggcagagtgagtttttaaaactattatgcaagaaatatcaggatttttgccaccaaaaagttggattcatagacccagggtttttacaacccagggggaaaaaactttcagccctcacaagaaagtattttattaaagactggcacccaaacctcaagactatatttctcactgcaggatttggcccctgtctgcctccttctcagactagttaaactttcatactccatccttgttccttcgcttctttcttaggatcttctgtgcacttctttcttaggatcttcttggcacttctttgctcttgaagggcagaaacgctattgtagaaattcaaggcactgtatgctgacatagtttatagttgtctttttcatgagataacacagcggctggcagctcctcttttctatcaaggacagtactgctggctcaggagagcagtaagcaaacagaagctgtctctcaaccctgtacaaagcgaaaccactcttttccctacaaaagtgagctgtgccccagaaaagcggatctgctgctgagcagggctcctcatgtctcctattgttcctgaaaaacagcatcaaagagggcaagactgacacacaatgttgtagcattaggagcctttttcagaataaaaaagcaatcagtcatatgaagcatgtggtcataccacaatcaacaatttttctccacaactggagatatggatttttctaaaagtccaactgattcatggccctgatacggggcagctctacctctcatgagaccaatgaccaagtgactctgactccaggaatctctgacagaagccaagctggaaacggctcaggaaacctgagctagaagatgcctttctgacacctgggaaacaaaacctcagtgtatggaggaacccaaggttttgtgttgagccccagtcgccaaggtctgaggaggctgggtttatattggccccgattttgtggccgaggcacaaggggaattgaaaggttgttgtgaggacctgctcggaatgtctttctggaagtttggagagggtctctcaaatgccaaaatttccatgggaagccattttcacagctgcttgggagtgggagatattcgtcatcatttctgccccatttagaataatttattactttgcttgcaaaaacccggaatcatccataggacacacgttgtttgtttttccactccacaccaaaggacagaggcattcctggttaatccaagatgccaacttcaagacattctgagaactagctggacagagctgaagtgtagggcaaatcagaacagaagtgatgggcccagggcaaaagcccgtgaagcagcagctgcggaggaaggatgggagctggagctgcaaagggggccatggtggagactctgggcctgcccacagtatcccctctgcccaatgggaattcagttttcctgcatatcattcaattatttctcatttttctaggcctagctcaccttattcgggaagttttgcgactaccccagtccataatgaatttcctctctagactatttcaattcttacagtcactaccacacagtctaggatttggttagttggttgatttcattcatttattcaataattcaatgtttattgagttcctactatggactttgtgccaggtatacaaaactgaatgttactgttgtgtggggtttttttctttgcatttttaaagttaacctggatttttctctcactctttatgcatgtatttcctaatctccctataaactatttgtatttttttggattcctcacagtctatttagcctgtggactgtcaacagatgttacatcattcagtcatttaatagatgcttatttgctagacatggccaggaggacctggaaagtcctcatttttcccatctgttcttaccattctgaaatgtatcatgctcttcagtgctccacagatctagatgatatcaaattattaaatggaaaaagcaagacccatctccttgggttattgtggataagggggaaattgtgtaggaagtgtctattgcagttcatggaccattgtaggcccttagtcaacaacagctatcatcatcactgatgagaatctctggcttaaacggagtaggttcatgccttttttcagtgtaatgaagtgttttagtttaaaggcctttagcaaggcttacaataaaaaaaagtggggactccagggtaacaccaacaatagagacgaccatggctgttatcctgagactattaattatgccacgtaattagatttagagaaaacttagagcaacatttatcttgtggataataattgattgtgattgggacttaccgttgagagaccctgatgaaaactctatggtgaattgctgtggagtcacatgggttcatgcatcattcatcagtgggccctggttttagcctcataacccctgagaatccacctctatcagaaaaccaccctttcagtgaaagttcctcaaggctcagaaaaattcatatgtcaaagctttatatgtaaaaacctatactctctaataaatgtttggtttggccttcacattcaatttaataattatttctacctcttttctaaaccgctcttaaccacagttctatatatttaattctgaagagcctcatgcacctccctccctggtaactttatctacttctctccctggagaaccagccagaccatgattccagccctctgtcctctcttcaaccgtaggtcctctttttctctcctgactcctcaaaccttctccagttacccggatgccttctgtgtgctgctggcttctgcatcactgttcacagggccacttgttcccctggaaatgtcttatgctcttgaaatgctatagccttgttcacctgttcatccaaaactgatcctcagacaacatttctctttcaattggtggaataataaagaggaatatgggtcaaaattcatagacatttaaatacccaaggtgcaaagttaagagaaaacaagataggagaaagaattatggcaacatctctaaaatgtgtactttagtgtttagcaaaaaagggactatggaatgtcaaacaggaacatatatgttaaacataaacatgaagcagtgccagctgctgtctgccatatagtcatgctttgttaatgtggcacatcttgccatgatggtgccctcatgaaacgaaggatgctgaagcagatgccattctgtttgctttgatcagaagccactctctggtcaaggaagtatttgtttcatgcttaattataacaagttctcatcacaaagattattttctttctccagatctggattgtttgcactcactttatattattagacaattactcagattgtttatgtttttatgtttagaaataagacagtgattcagagagtccctgtatttagatgaaagaacattttttaaacatattgactgtaaacactgaaaatcattaattctcaacagttgaaggtttctgacaggaacggcccttggaaattgtaaatgggcacattgtcaggtatgcccattgttgtcacattggagaagattggattctgttctctctggagtcctttgtaatgccaagcttcctctccagggagctggcttattgtcattattttgagataaatggcacttcatagtattaagtggttcattgtctcttctctggctgactgtattctgtaggcagccactcaactttggagcctttctctgctaccaacttttggtgttgccttaagcaagcctcatggctcctgttagtttcctgacaacatggtatagcatggactttgtcatcagagaggactgaattcaggagaagcaactctgccacttccttggcggaagggggatgactgatgtcctttgataagctgcttccctgagcctaataaaaaaatagaaataatgatacttaaactcatggaattgttgtgacaattgaaagaatgaccagttagtaaagcatcttgcaccatgactagcacacagtagatgcacatgagtgttactaagctttagttatgccctccaaatacaaagccttagttttgtcactatgaaagaaattactctgttcttcttagcaggtaataaataaatccctgcctggaaattctgcaggagaatttcacccctgcgctttcaggttaaaagattgcattcccatgatgaagatgttctgtgaatagaatcatctcaagtcccaaatggtgtggatttgctcctgcatcttgttgcagagattctcttggagcttctgagaactggggaaaccaacaaaatgcctgtagcctggggaaaatgtagggagttttagcatgaatttgtgggaggtgagaaaaggcagcaggtgtcgaaagacgggaaatccttgcactgttctagatgttaggagccattttccattcacattcagcacctcaggaggagaagctgcctatcactttgtgtcctcaagagaaccaacaaaggagaatgccatctcccagatactcaatttgattaccattttatcctaccttctctagggtccagacattatgtaaattggcattaagtttgaataatgtatggacccagtttaaaaggaaaaaatgctttgggaggctgaggcaggtgcattgcctgaggtcaggagttccagaacagcctggccaacacagtgaaaccccatctctactaaaaatacaaaaagttagctgggcacggtggcgggcacctgtaatcccagctactcaggaggctaatgcaggagaatcacttgaacctgggaggcagaggttgcagtgagccaagatcgtgccattgcactccagcctgggtgatgagagcaaaactccatctcaaaaaatttttaaaacaaaaggaaaaaatgctcccctgattcccgcagtgctgacttaaaatgttcttagtatgccaatgttgcttaaatatgaatgactgtagcttctacttaaattggcaaccgcaccaaatataaactgcaaatgtttatagctcttatggaagtataaaagcaaaacaaattcttaaattaaatacaaactaagagggaaactgataataacaatgttttgtgtaattaagttgctgtttgcaacatgcctggggcagactcctggcctctttgcatctgacatgagaggctaccaaggatgtggccacaactgggctctcccagcacttgcttgcgctcagaactgtgccaaaacctttgctcgcccagtgttctgcaacgtccatcatttggatttggcaggaacacatcatttatgcattttgtttgcttctgtatttagttgagatacttaaaatataactgctagattctaaggcattcataagcatctgtgaaaaatgtgttacttaggaaacagttcagggttccatggattatctagattggtgagtcttaagactgaccacacaattcatctgggggtgtggaggaggggagctttgagaaaaatctctgtatgagcacccacacccagagattcctatgcaattatcccagagtggtgccttaatatcaacatttgtttaaaaccatcccccaagactaaaatttgtgaccgggatttagaaccattgacttaattgatgcagaacactctgatattaatgtcttcatgtcttttggaatgtcattaagacaaaagcataaaattttaaaattcttaaagacaatttaaagacctatgagaatccatctttaattctcaggagcgtgtggaacctagtttgaaaactactggcatcgacaattgaatttccactaaaataaaatagctctctagtatattacaaaactacccattctgcaaactgcaggggagctactgataatgcttggaactgtgccaggcactgcctgcataaaaatgagtaaggtccacttcctccatggactgggttgggtaggaggcaaagataattaaccaattattttaatattatgagttcagggttgtaatgaaagtaagtattgagtgctgcagagacccagcaaaggagtccttagctgagaactgatcctttgctgagtgacgaggacattattgaaccgccaggcttgatggcatgttgcatggtaacagaccagtacaccaaacagcaggagctgtagcagagaaagagtttaataattgtgtggcagccaaataaggagacagaaggaaaccttaaatccacctcttgaaaaagtctgggactaggctttttaagagaattctggcaagaaggaggctgaggagctgggggtaactgattggttaggacataggagaggagacaataaggatatagaaactccattcttgcactgggtcagttcctcggagggggtcctcactctggctggcagcagtgaacccattggaatgcaggatctgaaaaatatctcaaaatggcaaacttgaggggttttttttagcatcaaagatgttatctatagaagttaggacattgtgacaggggctacgtgactttgaagtgttaagtggctgtcagaaagtgagctattgcagcggtccccaacctttttggtaccagggaccagcttcatgaaagaaaatttttccacagatggggtggtgtagggtggggtgggggatagcttcgggatgaaactgatccacctcagatcatcaggcattagttagattctcatgaggggcacacagcccagatccctcacatgggcagttcacagtagggttcacagccctatgaggttctaatgccactgctgatctgacaggtggcagagctcaggcagtaatgcttccttgcccaccactcacctcttgctgtgtggctcagttcctgacagattacggactggtaccagtttgcaacccaggcagctggggacctctgggctgtagggtaggctggttaatgcttagctgtgtttctattcaaagcttatgcttttgtttaaaacctagtaatttggttttgttaattttatgaagatgatttcaaggatgagtaggattagctggagtcagaaggacacaagggaatttctggcaacaacattaaactaccagtgaatgtctcatcaagtcactggacctctaattctaagcagtactgtcaaccttataggttatgatgtataagatagtgttgtgatgtataagatagtgcaaaaacctaagttaatatcaccatttctgtagtactctctatttcaaaggaaaaaatcttcagcagtctaatatcctaccaaaattttgaagtcaagacctccctacactaatcaaagaactagaggtgcaatcaggccatatatttggaaaggccataggtgccctccctctgtccttgttcccagcatactaaactatagtctaaaagactttaaaacttgaactgaagaaaaccttaaggaaacaacaacaaaattccatttatttcctgagcccaaaagtagaataattgttttttaatgaatttttctttccctgtaagacatactatgaattgttcaatgggtattcaaagcatatgtaatagaatatgtatgctttcctgaaaaattgaaatggaacatcaaactgttctgtaaagttttgagtctagaccaaactcacagcacttagccagaatatgtacatctgcatctgccactcatggccccatcgctccctccaactgcttctcttgggctgaaggatggaaaagcaaactccctgcgttgagttccatcttgccctgcatggcctcccccatggggtcattgagctccccaccagcttccacctcttccagcactttccgccagagggcccgtggctgcttttgcagactgaaattgattgtggttgattcagctccatttcctctgagtttttactttagatgtgctttttaggttgcatttttcttctggcatataagaaagacagcaatattccatggaacagagtgatgtctgtggctttgtcaaccgttgtttgttagcttgatcaccatttattgagtgtttactactttccaggcattgtgctaagtggtagaaatacaaagttgcctttacttgattcatctgtaaaatagagagagtagtagttcctacagtgtggtttatgtgaggcatagggactgctccctgaaacctagggacaactccctagcagcgacccagtgctcatatcaatagtggtaacaattaggaaggcagctcctacctcaaagacctcatgatctgatggtaaagacagatataacaagaaaattattctttttaaatataaaattgtgatataaaaatagttttcactaaattggatttttatgaaatttacagaaacaaaataataaattaaggaaatataaaaccacctgacattagccaaccatgttgatgttctgattatgttactgcaaaggagtgtagggttaagaacgagggactttgattccaagatcaaatccctttctgctatttcttagctgtctgactttgggcaagttgcttaaaccctttgtgcttctgtgtgcttgcccatgagatggagattataatagcgtctacctcatagggctatttttaatacaagttagctcttagaacaatacctacttaaactaacaatttgtattaggtactgttttattctccatccgtactgtgtatgcatatattcatatttatatttacatattctaattaggattatatacatgtactttctttaaaaataagattttaaataactatataatcagtcatgatgatacaacatgatttattcaacaaatctgatgctgttaaacacgtaagtgatttctctttcaggattataaataacatttgttttgcatttttttcatacatcttttgctcacttttcattgttactttgtatatgttgctagaaattgatttgctggtgaaaagggtataaacatttttaaggctcttgctacatattgcctgctcttcatacatattgcctactgccccaggaaactatcaattacacttttaccaagagtgtatgaaagcattcacatgaatgtaaccttatcatgcaatgcgggccatgagacagaggagagttatggagggtagacggcttccccgctgctcagccactgccctctcctctaaaagagccacagtcaggaatttctacatagatcctattataaacatctccttttgaaacaaattatcttctctcagagcattttcttcattttagtatctatataggtccttgttatgttcattttaagttttgtgacctgcactgacacaatgctgatgaactgcttattccaggcagtctgagttctcaaagcatttgcattttatgtcttatcctctgttttgggctctttgccactgatttttttttaagtgatattttaagaaagaggagggttgatttgttgtgagtgtatctctctttaaaaacttttctagggaaggacaacctcttccaaagactttgtttgctttgtgtgattggcatgtccttccctggtcagtaatgagcttgaaggaagctactggacacgggactgaacatggggttttgctatcactctagctgtgcctttctctagtgatcaaggagatgttggttcagaaagtgccctgtctaatcccactaaggcccgaaggaccaagtgctgtctactctccagattctctgcaacagaaagcagatgcttaggcttcatggtccaggttggaacaggtagttagctctgaggacagttatgcatgaatgtcaggaggggactggcaggggaacatttatttattctttaaaattggaatcaacagttatggatgaaacccagaatgcaaaattcactttcatcttgacacgcaacacatctgtcctttctccttgaatagcaagtattaatcattgagttagacaatgtaaccttcacattcagtgaaagccaaacactcagcaccttctagaaaaatcttagtgccatgctttcttagcatattgcaagtcctctgaggatgatgtgttgttcagctttgaagctgatcttttgtacttgcttatgtagctcaggctagtgataacatgccagaggcatttccaactaagaaaattattcacagaagctttaattacaaatttgttagccccacttcctgctaaaatggccagccttgaagagtttcggaaatgtgagcagccttaaggatgatagaaatattatgaaatagtaataagtaatacccatacagcaaactcctttttctttggagtatccgttcatcagccagatttccctctcaacagtccaggtgttgacgaagatcatgaaataataggaatgaaagggacttcgattttgtatttttaatagcattttcctccaccaaattacgaaagtaatgcatgaccaaggcagagaacttggaaaatacagaaaagccaccaagcaaaataatctcccaagaaatcataatttcaccacacaaaagtaaccattgtcaacattttggtgaaaatccttaattaaagagactcttaaaagatgccagttcgctgccacttcttcctttctccacaccatcctgcaccctgttttgaaatgcagaattgtttctaaatcattccaggaaaattattagttttctcaaatatctctggaggcgagtctgttggcagtcatttctagtttctcacaaaccttgaagttaggaaattatttgtgtagcttttgagcactgggccagaagtgagggatgtttgggttctagttccagctctaccacttatttaccaactggccgacctcaggcaagtccaggctagcggccccgcctcaagcccctccagatgcagcatctgcaaccccacttccttcacttcctttcgcctcagtttcccaacaatttcctagtaattgtactgaatcattgtttttcattttttacattaaaatttatttattttattttatttttaaagactttattttttagaacagatttagatttgcagcaaaactgagtggcaagtacagaaagttcccatatattccctgcccccgcacatacacagtctccctcactatcagcatccccaaccagagaggtacattggttacagctgatgaatctacatcgacacgtcattatcacccaaagtgcatagtttgcattggcgttgggcattttagggcttttgacacatgtatgcactattgtaatatacagaataatttcactgccctaaaaatcctctgtgctcctcctattcattcctccctccaccccattcctggcaactactgatctttttactgtctccacagttttgccttctccagaatgtcatatacttggaatcataaggtttgtagccttttcagattggcttctttcactcagtgatatgcatttaaggttcttccatgtctttttatggcttgatagctcatttctttttatcattgaatactactactccattgtctggattatacacactttatttatacattcacctactgaaggatgtgttggttgcatccaagttttggcaattatgaatgaagttgctgtaaacacccatgtgcaggtaattgtgttgatatgcatttttaatgcttttggataaacactcaggagcacaattgctggattgtatagtatgtttagttttgaaggaaactgccaaaccatcttcccaagtggctgtaccattttccatttccaccaacaatgagtgagagttcctgttgctccacatcctcatcagcatttggtgttgtcaatgttctggattttggccattctaacaggtgtattgtggtatctcattttgttttaattcgcattttttggataatatcacatggagcatcttttaataagcttatttgccatctgtgtgtcttctgtggtgaggtgtctgttaaactctttggtccatttttttaatcaggttgtttgcgttcttatcgttgagttttaaaagctctttgtatattttggataacagtcatttagcaggtatgtcttttgcaaatattttctcccagtctgtggcttgtcttctcattctctggagatcagtggtttttacactttcttctgctgaagccaagtattgtggaagaagccatggggtcaccagaggataggtgcacagggtagtgagggaaagttggagtgaatgggcttggtgcccccaccccgcaacatttctcttgctttaatcagagaagtttgacttcatccagattgcatatgaggactttacatgaggttcacctttttatttgttttaaaaggggtttttactctcaaaatgttttaaagaccactgaactagatgatcatcttaaggcccttttaagatttatgattctggaattctgtggctctatttttccaatgtaatataaccttcctctcgttaaggaaaaatgagataaacctgttataaacactcatgtgacattttttcaatacagttttcatccacgtagtgctcacttagaatgatagaaacaatacacctaaagaatatgcaccattcacttgcccactcatctctcaaagagaggaactttcaacactagttatctttttaaaaataatcagagagaattctcagccacttcaattctagcccaggaaaaagagggaaaatacatttgaaggtttctggctcatgtgatacatttgcaaaccagaaccaagatgatatgactctcatttattagtgactattgcaaagctttgcaggctattaagcaggctgttcaatttagggtgatatggacatgtgcatattggccaattatatatgctcagatcgtatgtcattttttttctgcattttagtctaagtgtcagataggtgtttcatgatgttttataaacacttctgttcacattaacattgttcattgatttggcaaggaatgaaggggtgtcattttcatgattttatttgtatattatgtattccacagaggatttgaaatgccttaccaaattttatgtaatgtaaaggggtaaaccaatatttgacacatcattataaattgaggataatctgaagaaaataataaatccaggagacagattatcacactgatatggtttggctctgtgtccccacccaaatttcatcttgaattttactcacataatttccatgtgttgtgggagggacccagtgggagatcatttgaatcataggagtggtttcctccatgctgttctcattgtagtgaataagtctcatgagatctgatggttttatcaggggtttccacttttatatcttcctcattttttctcttgccaccaccatgtaagaagtgcctttcgcctcccaccatgattctgaattctgaaccctccccagccatgtggaactgtaaatccaattaaacctctttttcttcccagtcttgggtatgtctttatcagcagcacgaaaatggactaatacagtaaattggtacaaggagtggggtgttgctgaaaagatagccgaaaatgtggaagcaatcttggaactggatatcagggagaggttggagcagtttggagggctcaaaaaagacaggaaaatgtgggaaagtttgaaacttcctagagacttgttgaatggccttgacaagaatactgatagtgatatgaacaataaagtccaggctgaggtggtctcagatggggatgaagaaactgttgggaagtggagcaaaggtgactcttgttatatcttagcaaagagactggtggcattttacccctgctgtagagatttgtggaatttgaacttgagagaaatgatttggggtacctggtaaaagaaatttctaagcagcaaaacattcaaaaggtgacttgggtgttgttaaaaccattctgttttaaaagagaaacagcataaaagttcagaaaatttgcagcctgatgatgcagtaggaaagaaaaacccatttttttgaggagaaattcaagctggctgcagaaatttgcataagtaacaaggagccaaatgttaatccccaagacaatggggaaaatgtctccagagcatgtcataggtcttcatggcagcccctcccatcacagacccggaagcctaggaggaaaaaaacagttttgtgggccagtcccagggtccccatgctgtgtgcagcctaggaacttggtgccctgcatctcagctgctccagctattgctaaaaggggctgaggtaccacggtttcagaggttgcaagccccaaaccttggcagctttcatgtggtgttgagcctgtgtgtacacagaagttaagaattgaggtttgggaacctccacttatatttcagaagatacgtggaaatgcctggatacccaggcaaacatttgctgcagaggtggggccctcatggagggcctctgctagggcaatgaggaagggaaatgtggggttggaacccccacacagagtccccactggggcactgcctagtggagctgtaagaggaggaccactgtcctccagaccgcagaatagtagatccactgacagcttgcaccatgtgcctggaaaagccacagacactcaacgccagcctgtgaaagcagtcagggttggaggtggtggtggctataccctataaagccacaggggcagagctgcccaagactatgggaacctacctcttgcatcagcatgacctggatgtgagacattcagtcaaaggagatattttgaagctttagaatttgactgccctggtggattttagacttgtgtgggccctgtaacccctttgttttggccaatttctcccatttggagctgctgtatttacccaatgcctaaacccgcattgtatctaagaagtaactagcttgattttgattttacaggctcataggcaaaagggacttgccttgtctcagatgagactttggactgtggacttttggttaattctgaaatgagttaagactttgggggactgttgggaaggcatgattgcttttgaaatgtgaggacatgagatttggagaggccaggggtggaatgttatggtttggctctgtgtccccacccaaatctcatcttgaattatactcccataattccaaagtgttgtgagagggacctggtgggaaacaatttgaatcatgaggccagtttcccctatactgttcttgtggtagtgagtaagtctcacgagatctcatggttttatcagggtttccgcttttgcatcttcctcattttctcttgctgctgccatgtaagaagtgcctttcacaagcataaggaagaagtatacttgctggagcagcaggctgtccttcttctgacgatatggactgcaagtgcctatgtttactttgaccaagacggcctttcttttcacagaaagccagggttcaccccttgaatttcataagacctctctttgcagtgggttagatactcttttatatttttatactctgtcaggaaaacatttttttttccatttaaaaatcagtcttttggttgcttccaagatggctgaataggaacagctctggtctgtagctcccagcgagatcgaagcagaaggcaggtgatttctgcatttccaactgaggcacctggttcatctcactgggactggttggacagtgggtgcagcccacggagggtgagccgaactggggcagggtgtcacctcacccacaaagtgcaaggggtcaagggatttccctttcctagccaagggaagctgtgacagactgtagctggagaaacagtacactcctgacaaaatactgcacttttccccacagtcttgacaactggaagaccaggagataccctcccttgcctggctcagtgggtcacacgcccatggagacttgctcactgctagcgcagcagtctgagatcaacctgcaatgctgctgcttgatgcggggaggggcgtctgccattgatgaagcttgagtagctcacagcgtaaacaaagcagcagggaagcttgaactgggcagagcccacctcagctcagcaaggcctactgcctctctagattccacctctgggggcagcacatagcagaacaaaaggcagcagacagcttccgcagacttaaacatccctgtctgacacctctgaagagggcagtggttctctcagcacagtgttcaagctccaagaaccaagagaccgccacctcaagcaggtccctgacccccatgtagcctgactgggagacacctcccagtaggggccgacagacacttcaaacaggcaggtgccctctgggacgaagcttccagaggaaggatcaggcagcaatatttgttgttctgcagcctccgctggtgatacccaggcaaacagggtctggggtggacctccagcaaactccaacaggcctgcagctgaggggcctgacggttagaaggaaaactaacaaacagaaaggaatagcatcaacatcaacaaaaaggacatccacaccaaaaccccatctgtaggtcatcaacatcaaagaccaaaggtagataaaaccacaaagatggggagaaaccagagcagaaaagtggaaaattccaaaaaccagagcgcctcttctgctccaaaggattgcagctcctcaccagcaagggaacaaaacaggatggagaatgagtttgatgagttgacagaagtaggcttcagaaggtcggtaataacaaacttctccaagctaaaggaacatgttctaacccatcgcaaggaggctaaaaaccttgaaaaaaggttagatgaatggctaactagaataaacagtgtagagaagaacttaaatgacctgatggagctgaaaaccacagcatgagaacttcgtgatgtatgcacaagcttcgatagctgatttgatcaagtggaagaaaggatatcagtgattgaagatcaaattaatgaaataaagtgagaagacaagatgagagaaaagaagagtgaaaagaaacgaacaaagcctccaagaaatatgggactatgtgaaacaaacaaatatatgtttcattggtgtactgggaagtgatggggagaatggaaccaagttagaaaacactcttcaggatattatccaggacaacttccccaacctagcaaggcaggccaacattcaaattcaggaaatacagagaacactacaaagatactcctcaagaagagcaaccccaagacacataattttcagatttaaaaagtatgaaatgaaggaaaaaatgttaagggcagccagagagaaaagtcgggttacccacaaagggaagcccatcagactaatgggatctctcagcagaaaccctacaagccagaagagagtgggggccaatattcaacattcttaaaaattcttaaaaaaagaagaattttcaacccagaatctcatatccagccaaactaagcttcataagtgaaggagaaataaaatcctttacagacaagcaaatgctgagagattttgtcaccaccaggcctgccttagaagagctcctgaaggaagcactaaacatggaaaggaacaaacagtaccagccactgcaaaaacattccaaattgtaaagaccatcgacgctatgaagaaactgcatcaattaacgggcaaaataaccagctaacatcagaatgacaggatcaaattcaaacataacaatattaaccttaaatgtaaatgggctaaatgctccaattaaaagacacagactggcaaattggataaagagtcaagactgtgctgtattcaggagacccatctcacgtgcaaaaatgcacataggctcaaaataaagggtcgaaggaaaatctactgagcaaatggaaagaaaaaaaaaagcaggggttgcaatcccagtctctgataaaacagaatttaaaccaacaaagatcaaaagagacaaagacagccacaacaagaagagctaactaccctaaatatatatgcacccagtacaggagcacccagattcataaagcaagtccttagagacctacgaagagacatagactcccacacaataataatgggagactgggagacaccccacagtcaatattaaacagatcaacaagacagaaggttaacaaggatatccaggacttgaactcagctctagaccaagtggacccaatagacatctacagaactctccacccctaatcaacagaatatacattcttctcagcaccacattgcacttattttaaaattgaccacataattggaagtaaaacactcctcagcaaatgtaaaagaacagaagtcacaacaaactgtctctcagaccacagtgcaatcaaattagaactcaggattaagaaactgactcaaatccacacagctacgtggaaactgaacaacctgctcctgaatgactactgggtaaataacaaaatgaaggcagaaataaagatgttctttgaaaccaatgagaacaaggacacaatgtaccagaatttctgggacacatttaaagcagtgtgtagagggaaatttatagcactaaatgcccacgagagaaagcaggaaagatctaaaatcgacaccctaacatcacaattgaaagaactagagaagcaagagcaaacaaattcaaaagcaagcagaaggcaagaaataactgagatcagagcagaactgaaggagacagagacacaaaaagccgttcaaaaaatcaatgaatccaggagctggttttttgaaaagatcaacaaaattgatagaccactagcaagactaataaagaagaaaagagagaagaatcgaatagatgcaataaaaaatgataaagggatatcaccaccgatcccacagaaatacaaactaccatcagagaatactataaactcctctacgcaaataaactggaaaatctagaagaaatggataaattcctggacacatacaccctcccaagactcaaccaggaagaagttgaatctctgaagacaccaataacaggtactgaaccaaggtttggaccaaccaaaaatgtccaggaccagatggattcacagttgaattctaccagaggtacaaagaggagctggtaccattccttcagaaactattccaatcaatagaaaaagagggactcctccctaactcattttatgaggccagcatcatcctggtaccaaaacctggcagagacacaacaaaaaaagagaattttaggctaatatccctgatgaacatcgatgtgaaaatcctcaataaaatactggcaaaccaaatccagcagcacatcaaaaagcctatccaccaaaaccaagtcagcttcattcctgggatgcaagactggttcaacatacgcaaataaataaatgtaatccatcacataaacagaaccaatgacaaaaaccacatgattatctcaatagatgcagaaaaggcctttgacaaaattcaacagcctttcttgctaaaaactctaaataaattaggtattgatggaacgtacctcaaaataataagagctatttatgacaaacccacagccaatatcatactgaatgggcaaaacctggaagcattccttttgaaaaccagcacaagataagaatgccctctctcaccactcctattcaacatagtgttggaagttctggctagggcaatcaggcaagagaaagaaataaagggtattcagttaggaaaagaggaagtcaaattgtctctgtttgcagatgacacgattgtatatttagaaaaccccattgtctcagcccaaaatctccttaagctgataagcaacttcagcaaagtctcaggatacaaaatcaatgtgcaaaaatcacaggcattcctgtacaccaataatagacaaacagagagccaaatcatgagtgaactcccattcagaattactacaaagagaataaaatacctaggaatccaacttacaagggatgtgaaggacctcttcaaggagaactacaaaccactgctcaacgaaataaaagaggacacaaacaaatggaagaacattccatgctcgtggataggaataatcaatatcacgaaaatggtcatactgcccaaggtaatttatagattcagtgctatccccatcaagctaccattgactttcttcacagacttggaaaaaaactactttaaagctcacatggaaccaaaaaagagcctgcatagccaagacaatcctaagcaaaaagaacaaagctggaggcatcacgctacctgacttcaaaccatactacaaggctacagtaactaaaacagcatggtactggtaccaaaatagatatatagactaatggaacagaacagaggcctcagaaatgacaccacacatctgcaaccatctgatctttgacaaacctgacaaaaacaagaaatggggaaaggattccctatttaataaatggtgctaggaaaactggctagccatatgtagaaagctgaaactggatcccttccttacactgtatacaaaaattcgctcaagaaggattaaagacttaaatgtaagacctaacacctagaagaaaacctacacaataccattcaggacataggcatgggcaaagactttatgactaaaacaccaaaagcaatggcatcaaaagccaaaatagacaaattggatctaattaaactaaagagcttctgcacagcaaaggaaactatcatcagagtgaacaggcaacctacagagtgggagaaaatttttgcaatccacccatctgacaaagggctaatatctttgtagaatctgcaaagaacttaaacaaatttacaagaaaaaaacaaacccatcaaaaaagttggcaaaggatatgaacacctttacactgttggtgggagtgtaaattagttcaaccattgtggaagacagtgtggtgattcctcaaggatctagaactagaaataccatttgacccagtgatctcattagtgggtatatacccaaaggattataaatcatgctactataaagacacatgcacacatatgtttattgcagcactattcacaataccaaagacttggaaccaacccaaatgtccatcaacgatagactggataaagaaaatgtggcacatatacaccatggaatactatgcagccataaaaaaggatgagttcctgtcctttgcagggacgtggatgaagctggaaaccatcattctaagcaaactatcatgaggacataaaaccaaacactgcatattctcactcataggtgggagttgaacaatgagaacacatggacacagcacaaggaacatcacacaccggggcctgtcaggggttggggggctgggggagggatagcattaggagaaatacctaatgtaaatgatgagttgatgggtgcagcaaaccaacatggcacatgtatacctatgtaacaaacctgcacgttgtgcacctgtaccctagaacttaaagtataataaaaaaaaaagaaagaaaagaaaagaaaaaaagaagtggcttttacctcccaccacgattctaaggcctctcagccatgtggaactgtaagtccagttaaacctctttttcttcccagtctcgagtatgtctttatcagcagcgtgaaaatgaactcatacacacacacagaagtatatctttacagttcccaggatggactgcaagtttggctctaaatttcctttgcctggccaaaacaaaaagaacacattttattataaggttcacaggcttttaattgaaaaaaaaaaaaaaacagttattcaacatgaaaactctttttcagacaaagttctacaaagtctatttctcacaagtaggactttggcaaggattgtgcaactgacaattcaaagtcatttattccgtggtgagaaaccggagtacagatctttaccagttaggggatgatccatgtgttttgataatcaccttggtggtgatcagactaaaggtctcctatgaaaaccattaacttcacactatagctgataggatgcactgaagcccttaccgctgactgcatggatgagagctaggccagagcattggcaggcagagtttataacatggggcaggaagcattgaaattctattccacctcttggtgtatcaggtcaggagtcaaatctcctatcttcctcttctggatcgctttcctcctgaagtgtctggcatagatgtctaggtatagcttggcatggtggtgtgtgcctatagacccagctacttgagaggctgaggtgggaggattgcttgagcgcaggagtttgaggctgcagtgagccatgaccacaccactgtactccaccctgggtgacagagcaagaccctgtctctctttctaaaaaaacaaaacaaaacaaaacaaaacaaaaagaaaaaaagatgtccaagtgtgttctggttactgctgctgactgctaaatttaacagctagaaaaaaaaagtttggactctatggatcataaatttggataagacacagagggaatggcttgtctcatgttcacaatgtctaaagtcttaaatggggagagtcgtcaaccaggggtaatttgagagttatgggctggaaccaccttgaggcatctttattcataggctagcaattgatgttggctgttggctgggacgtcagctggagctgtcaactgggagacctgtctgatatcccagcataggacactagacctctcacaaagtggcgagggctccagaagcaagtgtcccagctgacaaaaaaaaaaagtttcatagccttctacgacatgcacttagaagtggtaatgtgtcacttccagccctttctgttgattacaagtgagtcatgagtccactcagtttcaagggagagggcccagatcccatatctccatgggaagagtgccaagaacaccttgtagaaaagcttgtggataggagatattggtgtggtcatccttggaaaacacaatcttccacagtgtgcaagagaggcttcctgctctgcattgtggcttaattattgttgaaataccaggcaagaaaaggtaggatccagggaaacaaatgtatccaggatgttttggtctgccttttctaggaaaaaaggaaaccctcaaagcctctgagactaggtcaccccagtgggactagaagttccacgtggaaccttctgcaaactcctctgcaatagatggactgtgcattttccaaatgtgtctttacatcatctcctttctgaccttgggaagatagtaactgactgtggagtaggaaatccagaaccctgattgttttaaaatatattacagatacaagtaatgaaaagaaggctcctaaggaaaatatagatccgtaatggctttgtcccaaaagctattaggctataatattttattacaaaggctatatttattacaaaatgtatttaaataaatacttaatatttatttaaataaataatatttattttattattaataattaatatttaaataaatataatatttcttacaaaaattaaaaactgggactttatatttaaaggtgagacattaaattctttttaaaaagtgcacatgtaagatttttttctcaagtcaactgaaccagttcatcagtttcactatgaatgtgttgatgcaccaagtatttactttctagaacatctagtagacgtcactaaaaaattataccaagttgaaaaatgtcactgaatcagaggcatgtggttggttatgtagtcatctgtgccagctgggaatatagcaataccaaatgaacagcactgccatgttcccttgctgggttccagcaaaaacactcatcttcactgtcgtctctctttgagacctcttagagaggactttgatgagtgtatggtcttatacacactagtctaacaatacacatttgctcaaggattgggttacgagcaggctcttcacctttcaggtgaacaattacacatcaggagaaggatggaagtttcctatctatgaacaaatatttcccaaagcaataatctctttattcaactcacgtaatgagaagtcagttcctctgtgccataaagcaatctctttgaagtcttcagtaatgttgagggttttaatgttgagggctttatcaaactaaacattcaagtgtcttaggctttccccttagttctttgagcaaattggttgctatgaagtatgttagtgttccgaatgaatggatagcatgatgggggatgtctaggtggttccagaatttagattgtggtttccataacaaagtgtggcagtattggcattagggaagagaaatgacttctaaataacttctcaaagtttactaaagccttaagaatgtaggaaatggccacaaaaggaggtatacaaaacattcctctgtctttattcctctttatacaaacgtattcactttcccatcagcaagtcataaaatacttctcatcttgcattacagtaggacacctactataacaataggctacaaaatgtataatggctcaaacacctagcagtttatttcttatttacttaacaatgctgggtccacgaacatgttgatatcataaccctcttttatgtggtcactcagggactcaggctgttgagggctctgtcatcatgaatgggtggcttccaaggtcatcctaagagttatctccattctaaccagtccagccagaaaggcagaacaggcttggaggagcaaagatatccatggatagatcatcctcttaaagtcattgtagcattgtgatagggctcttttcacaaaacaaggatacaatccatgttttcaagattttacattttagtagccacaatacaaagaagctaagatagtcttgtgatttgtcatcatggctgttaatggagagtgttttaaaagcactgatatcagggctccaccctcagcttccaatcatcaggtttggatggaacctgacagctgcatcttgtaaaactccacgggagattctgagagacagccaagtttgagattcacaaaccttaagagaaaaaatctccttgaattgccataacaaactaccagtctaataaaacatacatattcctttgactactcttaaatgaaacaaataggtaataatttacctgtacatataattaaaaatgtaatgtattttataaccatcatataaaggagaaattatattaaactatattaaaataaaatgatatatatttcaatgcagatgcccaagcttgactaaagtaggaaacataataaagtaataaaatgcttatatgtacttataatgaatgtttggctatgagaagatgatcagaggctttttgtccaagaagtacaggcatatgaaaaagtagagcaagagatggacaccagactgagaaaactaaaaactaaccaacctatttgtgtatgataaaaggagagaaaaaaaattgattagtaaaaatatgctaccgtgtggtctgaatgtttgtcccttccaaaactcatgttgaaatttaatcccccatgtggcagtattgagaagtgggacctttaagaggtgattggttcaagaagattctgcgctcatgagtggttgaaaccattcacggaataacgggttaatggatcaatgagttatcccaggagtgggactggtagctttataagagaaggaagagagacctgcgctagcacactcagcctccttgccatgtgagccatctcgggaccccgcagagtccccagcagaaagaaggccctcacccaatgtgtccccttgacctaggatttctcaacctccataactgtaggaaatgaattccttttctttgtaaattatccagtttcaggtattctgttataaacaacagaaaatgggctaaaacacacgccaagaaaattgaaagactgtggaagtgaaagaagaataaaaaatgaagtaattttgcaaatgagtctggctttattataagtgtattgtcaaagtgattccctttgttataagatgaaaaagagccaaaatggatagaaacatttatcctatcttaatatcccactacattcaaggcaaatattcagtcagtctctagaacttaacaaggccttggagatgatatcctttggatgagcaatggagaagacaagatggattggaaaaagaaacaaacaaacaaaaaaacatgtaagaggctatcaggaaaactctggagacgatgtcaatgtaaaacagatacaaacctcaaaataattttaatatgtacattgcacaaaaatggacttcttatcatgttacaaatttattttaaaacatataggaggcaacaacaatatttcattgatgtgtactattttataattgttggctctaattttatttagtagagtcttacatctcctctctacatatttacatccggttgtattgtttttgtagtacctgttcaactgcactgaaatcatttcaattaaatgcatggttgaaaagctgacataatacattcaattgccaaattgcataaagtgaataagctatttaataatttggagaaaatatattccatttaaacttccttctctataaccagttcatacactggaccttttgggcacagccatgtgaaagcttttcaaaacttttcactacttttttttgagacggagtctcactctgtcacccaggctagagtgcagtggtgcgatctcggctcactgcaacctccacctcccaggtccaagtgattctcctgcctcagcctcccgagtagctgggattacaggcacctgacaccacacctgactaatttttgtaattttagtagagacaggatttcaccatgttggccaggatggtcttgaactcctcatctcaagtgttccgcctgccttggcctcccaaagtggtgggttacaggcatgagtcattgcacccagccactatagatttttatttgtagtagatttagttcagtagggcatttgagaggcataggaactggaacaaatccttcattgtttgggactgccttgcacattgtaggacatccagtacagtcccttccacgaagtggcagcagcagcctcgggctgtccaaacaccctgttagggacagtgccactcccggaaccacagaagaaccacaatcataggagaagcatacaacaaacatggtgttcatcggacggtcagcttcagtggcacttttgagcaagcacactatttggttgtagaatgagtccctggcagggcacccgaaaggctgatgtgtgactcatccctagtacctctgagaatgctgaaatctcctccttctccaagctgagtggcagctttctggtccagactacttaaattgtgacttgaggaattttcttcactttttcctttgagtcattctgtttttgatcaagatgcgatagaatgaaggattctttcagggtctgctgtcacatccttcctttgggaacagatagaaaatctggcctggcttgaagagtttgtcctcaaacatctggtaagccataggcatcagcatctcttacttctccagagacatttagatgtgtcccccatctccatggaggcccatggcaaggggacccctagttgtactagagcttccttctgggcacagccacactgcacaggcactgcagtgtacagcacagctcctccagcttccggaagactccattatctagaaaagtgctgagaaatggagaagggggttcctctggggtggagatggaaagaggaaaaggaagggagaatgtccaagcaaaatgagagaaggtgagggacagcagaattgagagtgagggagagggagagagcaagagactgggttgagatgtcttgtacatgggggtgtcctcgtggcttcactcccctttcgtttgtaccactccgtttccccagactcttcctaaatatccccttattggctacaagatccagattgcctagaagctcagatttgctgacagcacctcaagactggttaatgacatatagattttttcttgtttccatctttgggatttggagcaatctccagagttgcaaaagcctaccttgttgcaataatatttttgagggtccacactgtctgctcacttgctctatgctgctgggcacagtggtgtggccatccagggtgggagagaccacctgggatatggaaattaccagcagccctgttttgctcttgcagtggttgccaaagcacacgaagcattctgggaatctgaatttctgttgtttctcccaaatggcccctgaagggcaacaggcagcacacatggaccacattttgccagaaaagtccagaaagaagatggctgctgttgtcaactattggcatttcaacaggacctatttttatttctcagtatatttgcacaactaggaagcatctgctgacaaggatgagatgataagctgtattgatgccaaaacaggactagaaaaacaggcttgttctgcaaatggcctgcatcctgagagtccgtgttaagaacattctctctctgcaggcaatatctgctcttaaaacattaacacttgaaaggaagtaaggcttggaatccttagcatagttatgcacacactaggttctcagtaagtgcatgctggatgaaggaacccacacgcaccttaaggaggatggaacattggcagcccaagaaaaaagtcactccccagaggccgagtgccatgtctttgacctccattggcaaggtcatggtgaaatgctgtctcttggggtcgctgaggtcccagcacggtgtgccttcacaccgtgcaaacaataagaagagaagagaggcacacatgtcacctttccaggcagggacatccaagctgtttgagtctccattctgtgatttccttgaacaagaaagggattattggtgaatgaggccagcatcctgggtgggaacaaaaaaggaaattggtagaaagtacatcatccaagttggtctaactcagccctgtggcttgggcgggttcctaggatatccagccggaggcagaggctctaggggatgtgaggctgcactgggtatgatgacacagaggactgtgagaggcagagaaaaggggagaagagctgaggccctcctagccctaacctcccagctcacaccctctgctatctgccacctccaggccaacaccacggccatgggaggtttgcccatttttctgatagacacattctttctctaccaacagcccacatggaacataagtgaagtaattcagcagtttccttcttaatctgctgtctctctgctgcttactcattctgtgctgtttgctttagatcaaggtgccccagggtaccaaaagctacattatcctattcaactgcatggaaaccaagatcccgaccattctggtttgttgttattgttacgttagttttaaaccttagccattttccattctgggcagttacaactctgtttactatgagttcctctgtgtagatgtttctcccatacccgacctacaaactgctacgtgagcagtaacttgtcaccatgttatccgcataaagtcagggattgataaacttgggagcctttagctcttgaaggtgctgatgaggaaggggagaggggaggagaaggaatttgtttgtgagatggtcagtgggctgaatagtggtatgaccaaaaagtgttactataaatacacataatctggaaaacaaaaatactgtcatctcctccctgcaaggcgctgtgattaggcaggatggagcttattgctgcagtgttagaaaatgcatccttgtagtcccaaaaaagcctgttccatcctgcccatctcttgttctcaatacttcttacttcacggtcactcattttcttcctgtccttgggttgaggtctcaacttcttgtaatagaattttttcagttataagcgacagaaatccaactcacactatcttaagcaaaaaggggattcactgatacgtgtgttaggaaggatatatgaaagctcaaaggtcaagtgaaaaaaatgtaagaacgaagaccttggtggggtgtggtggctcacgcctatcatcccagcattttgggaggccgaggcaggtgggtcacaaggtcaggagttcaagaccagcctgcccaagatggcgaaaccccatctctactaaaaacacaaaaattagccgggtgtggtggcaggctcgtgtattcccagctacttgggaggctgaggcagagaactgtttaaacctgggaggcagaggttgcagtgagttgagatgtgccactgcactccagcctgggcggcagagtgagactctgtctcaaaaaaaaaacaaaaaaaaaaaactaagaccttgtgactactacctactacctggatctctctctctctctctctctctttctctctctctctctcacccccccacactatcacctctccttgttgtcagtagtttcctttctgcagacaggagttccatgtgctgggaagagggccattcagagcctcgtattctcatcctctcagtttagcaatgcgagaagaaaaaacttttgtctcacaacctcatatacaatctcagaaataggctcttattttctggcttgaggctgtccagaggcaccaggcactgtgatggtctcactttctgtcctggatctatctgtggggcccagacagcaggatctatttcagaaaataggcgagagaggaaaaacttatgtggccgtaaaaaacagcggttttcaagtggcctatccccatccacatcataaacttttctgctgaggcttaaaagtgcttagacttcaaacttgatctaaaacagaaatcctacctggaaaaatcaccttccagtcacttagccaatcgctcatcactctctgtctctgaatctcaccacgagtttcacacgtctcccgagagagcgtctcctttatcattaccacatgtggagtcagcagattgggtttcatctaagctctgcctacctactatccgagttccctagcaggttagtgactttctctgcctttttgtttcttgatgtgaaaaggaacaacagtggctgctcacagggttgtcagttacatggtcaattacattacatggacaattcatgatggtgtcagacctgtctgagaaaaggtggcccatgttaccatgacaggccccaaggctaacagcccctttctgggtcatggctcatacaaaggagccctccttggtttgctggtgctctgagacttgcaaatgcattaggaattttacactgtaacccggttttaaatgggtccagagcatccccattgctagactactgtgctgaggaagggcactggctcattgttacatcccatgaacactctgggtctcctagacctcatcctctttgagcttctctctctcactctctctctgcgcattcaggagtgtacacatttctgtccagcaccctgaagtctctggaagagaaggaccatatccaccgagtcctggacaagatcacagacactttgatccacctgatggccaaggcaggcctgaccctgcagcagcagcaccagcggctggcccagctcctcctcatcctctcccacatcaggcacatgaggtgaggcatctgtgggcttcctacaggagagacataaagaaaacatgcccccaaacctatgtgacagctggccgggaaggactggtgcctgcatatggagagtgcacttgtgacagttcctggcatagaataagcataaatgctataggaggacagaagagagaggttttaaatctgcgagggtcacagggcaagtgtcagagaaggcatagaggaagcgatacttacgcttggtttaaagcatgtgctttggggcagtggtttagagattgggtgcagtgtgcaaataggaggagggggccaatcaagagaagtcagtgaatgtacacatcccctgaagacactgggtacatctgttatggtccctgtgtacactcggatattctaaatgagagaccctggggccagatgcctcacggagagtcaatgttgactccttcatacctgttgaaccccttcttgtcacccccattgccattaccctagtctaagccaccatcattttctgttggacttctgtgccagtcactggatgtgtatccctgcctgtaatctagatcctttctagatcattctccatgatgtgtccagagtgatcattctagaaccaaatctgatgtcatcctcctgcttaaaacccttaagttctcattgcttttagataaaatataaaccctttcactttgtttttattactccttatgattcagcccttacttagcttacaaggacttcctcatgtctgagctctagccataatagctgactgttggatgagtcatcggggggaggttcttcttcaggctgcagattggcggtcagccctcctgacctcagctgggctcactcacacatctgggaggcagctgcctgaggccagggtgactctgctctatgcctcatgtctcctatcctccttgtacccacatgttagctgggacatgttctcatcgcaatggcagaggcatgagaaagtgatcctgtttgggcaagtgcattttactcttttctttcactcatgtccactgacatttcattggccaagcaagcatgtggggtgtccagagtcaaagagggacatgttgccggggtcatgactatttctgagcaataatctaacctatcatagctcagatctcactccttgcaggaagcatctcctaatccttaagacctagttggaacttacactctgttcttccctatggttactgcccattttactatttttctgcccatttagactgacaactctgtgagccatcattgcaatatggcttgcttacccaatatcacctagcatgatgtagagcacatagtaaatactcaacaaatgttttctgtaagagctaaggaaggacatcagcagacaaaatagagtctttctatgccaaaaggtgaaagtggtctcatttccattccattgtcctgtaatttggctagccaaaagcttagtggataccattcccataagtagacctcatctgcagggaagagatggggagactgctgggttatttattgcagactccagcaggaccacaacaatgattcaaagtgatgacactagaaggacaggtgccaatgggtgatgaagccacaatgacgatgtcaagtggtatcactaaaaggacaggtactcatgggtgatgaagcctacatgaccttgggcttacaccaggaccctaggaatgaaagagattccttctcttagtggctatgagggaaggcctatgatgtcttaaggaggttggattcgatcatttttaagggaccttcaaatccttagaccgtgattcaaatggtaagaagtttgctccattaaactcccaggcaccaccctttccggagacaacctttaaaaattattagctcctgggaaaatagatgtatctcattttctttgtatccctcacagtgccatatgtgaagacttacatatggtatatgcccccaacattactactgagtgagtgaacaaagaaatgagggaatgaatggatgaacaaatggctcatggcaggcttttccctgccctgtgaattcggcttctacttggtaagaaggtgattgcaatctctgttctcagggttccccaaggattcctgtgtaacagatgaaggaatcacgtctgtcaggtagagtaggtgactgcattcagagtatacatttccagtctcccctgtctttttcttttgatgagtattatagagagggaagccatgagtggattagatgccaaaatccctggctgagagaataaccttaccctggaggaaaacatattagctttgactctgagctgggaatttcggtgatgttgtagattcaatgcattgcagttgggtgtttttatttgttgaaaggaattgctgaattttcaaatccattaactgcttgtcagcattagcaagcctaattagttaatactaagtaaatttgcactaaatatacaaccctggctgattttactggccacgtctggcagagggcagcagcagggagaaagctctgtagagtttctgttggaatcgtgtgaaaagctggagaggttgcttctctttctctctctctctctttctctctctctctctgacacacacacacacatacacacacacacaattgtaataataataatattttggttcctcactaagccaatctaaatcgcagaagtctattttgttaagtaagcttggccccagccatatgttgctactcagagaatttaatatcagatttcatctgactgtaaacgtgaatcatcaggttgcacaaggaacacagtggcagatccagggggcatttaacttttatagcattttaaatgaaaaaaaaaaaaagtaacacttaaacaagtaatttagatcatgctgtaggccctgaatagctttgatgttgtgttttcatggcaagtctccaacttgagctgaattttcccctactaaaaatgcaaatttttctaagaccttctcttggtcctgctactcatgatacatatttcttttaaaagaaatttcaaactagataatagttgttctcctccccacccccgccaccagtagtgtggtggggcagcagagttgtggctagtggaggagagcagaggaggagagtagggaaaggagaatgccatttgcctacatttccctctgcccatttcccgctgcccatttccccccttgttttcctgaacgtgaactgagctctgggcactgttttaggcctagcaggggacaggataaagcctgcttctctaggaattcgcactgagggtgtgagtgtgtgcacgtgtgtgtttggaggcgggagaataaacacaaataaataaaaaggagaatttcaggcagtgataagagtgctgagaaaaacagaacggtgtgaaagaggaaggctgagcctgcagaggcttgaggctgctgccactgggtagcggtaggcctttccgaggaggcggcatttgaagaccggaggaaggttcatcccagcaagtaggaacagcaagtgtaggtcccctaagtcttgggggagcttagttcctttaagggcagcacaaaaatcagtgtggctccggagagcacattaggggagagaggcaggaagagcttggagacatggatggaagctggaccagttgggccttgttgaacatggaaaggcatttagatcgtattctgagttaaatgggaagtgacgtgagagatttaacaatggagcgtcttgaactgctttactcatttaaaatacccactcctgcttggctgaatatctcatgttgtctttttagaagctttggcgatcctatttgaatgcatttaggtcctattggaggggaataggatctcatttgaggccacggaggtccatggaagtcacctgcatagcaaataccctgaaagtggctgcagggagagtgtgagggtgggaccgccctggtaggaggtggaaaatgaaaaacacacggccatgagttccagattagggcttctgaaagccctcagctttcccagctcccatcctaaagtgggtctttaaacaggaagaaagaaagattgctaagtgtctttggagttcctcttccttccccttctagggatttcagcactcctggggctcgggttggctctaaagtagtcctttctgtgtcttcccacctacagtaacaaaggcatggagcatctgtacagcatgaagtgcaagaacgtggtgcccctctatgacctgctgctggagatgctggacgcccaccgcctacatgcgcccactagccgtggaggggcatccgtggaggagacggaccaaagccacttggccactgcgggctctacttcatcgcattccttgcaaaagtattacatcacgggggaggcagagggtttccctgccacggtctgagagctccctggctcccacacggttcagataatccctgctgcattttaccctcatcatgcaccactttagccaaattctgtctcctgcatacactccggcatgcatccaacaccaatggctttctagatgagtggccattcatttgcttgctcagttcttagtggcacatcttctgtcttctgttgggaacagccaaagggattccaaggctaaatctttgtaacagctctctttcccccttgctatgttactaagcgtgaggattcccgtagctcttcacagctgaactcagtctatgggttggggctcagataactctgtgcatttaagctacttgtagagacccaggcctggagagtagacattttgcctctgataagcactttttaaatggctctaagaataagccacagcaaagaatttaaagtggctcctttaattggtgacttggagaaagctaggtcaagggtttattatagcaccctcttgtattcctatggcaatgcatccttttatgaaagtggtacaccttaaagcttttatatgactgtagcagagtatctggtgattgtcaattcattccccctataggaatacaaggggcacacagggaaggcagatcccctagttggcaagactattttaacttgatacactgcagattcagatgtgctgaaagctctgcctctggctttccggtcatgggttccagttaattcatgcctcccatggacctatggagagcagcaagttgatcttagttaagtctccctatatgagggataagttcctgatttttgtttttatttttgtgttacaaaagaaagccctccctccctgaacttgcagtaaggtcagcttcaggacctgttccagtgggcactgtacttggatcttcccggcgtgtgtgtgccttacacaggggtgaactgttcactgtggtgatgcatgatgagggtaaatggtagttgaaaggagcaggggccctggtgttgcatttagccctggggcatggagctgaacagtacttgtgcaggattgttgtggctactagagaacaagagggaaagtagggcagaaactggatacagttctgaggcacagccagacttgctcagggtggccctgccacaggctgcagctacctaggaacattccttgcagaccccgcattgccctttgggggtgccctgggatccctggggtagtccagctcttcttcatttcccagcgtggccctggttggaagaagcagctgtcacagctgctgtagacagctgtgttcctacaattggcccagcaccctggggcacgggagaagggtggggaccgttgctgtcactactcaggctgactggggcctggtcagattacgtatgcccttggtggtttagagataatccaaaatcagggtttggtttggggaagaaaatcctcccccttcctcccccgccccgttccctaccgcctccactcctgccagctcatttccttcaatttcctttgacctataggctaaaaaagaaaggctcattccagccacagggcagccttccctgggcctttgcttctctagcacaattatgggttacttcctttttcttaacaaaaaagaatgtttgatttcctctgggtgaccttattgtctgtaattgaaaccctattgagaggtgatgtctgtgttagccaatgacccaggtgagctgctcgggcttctcttggtatgtcttgtttggaaaagtggatttcattcatttctgattgtccagttaagtgatcaccaaaggactgagaatctgggagggcaaaaaaaaaaaaaaagtttttatgtgcacttaaatttggggacaattttatgtatctgtgttaaggatatgtttaagaacataattcttttgttgctgtttgtttaagaagcaccttagtttgtttaagaagcaccttatatagtataatatatatttttttgaaattacattgcttgtttatcagacaattgaatgtagtaattctgttctggatttaatttgactgggttaacatgcaaaaaccaaggaaaaatatttagtttttttttttttttttgtatacttttcaagctaccttgtcatgtatacagtcatttatgcctaaagcctggtgattattcatttaaatgaagatcacatttcatatcaacttttgtatccacagtagacaaaatagcactaatccagatgcctattgttggatactgaatgacagacaatcttatgtagcaaagattatgcctgaaaaggaaaattattcagggcagctaattttgcttttaccaaaatatcagtagtaatatttttggacagtagctaatgggtcagtgggttctttttaatgtttatacttagattttcttttaaaaaaattaaaataaaacaaaaaaaaatttctaggactagacgatgtaataccagctaaagccaaacaattatacagtggaaggttttacattattcatccaatgtgtttctattcatgttaagatactactacatttgaagtgggcagagaacatcagatgattgaaatgttcgcccaggggtctccagcaactttggaaatctctttgtatttttacttgaagtgccactaatggacagcagatattttctggctgatgttggtattgggtgtaggaacatgatttaaaaaaaaactcttgcctctgctttcccccactctgaggcaagttaaaatgtaaaagatgtgatttatctggggggctcaggtatggtggggaagtggattcaggaatctggggaatggcaaatatattaagaagagtattgaaagtatttggaggaaaatggttaattctgggtgtgcaccagggttcagtagagtccacttctgccctggagaccacaaatcaactagctccatttacagccatttctaaaatggcagcttcagttctagagaagaaagaacaacatcagcagtaaagtccatggaatagctagtggtctgtgtttcttttcgccattgcctagcttgccgtaatgattctataatgccatcatgcagcaattatgagaggctaggtcatccaaagagaagaccctatcaatgtaggttgcaaaatctaacccctaaggaagtgcagtctttgatttgatttccctagtaaccttgcagatatgtttaaccaagccatagcccatgccttttgagggctgaacaaataagggacttactgataatttacttttgatcacattaaggtgttctcaccttgaaatcttatacactgaaatggccattgatttaggccactggcttagagtactccttcccctgcatgacactgattacaaatactttcctattcatactttccaattatgagatggactgtgggtactgggagtgatcactaacaccatagtaatgtctaatattcacaggcagatctgcttggggaagctagttatgtgaaaggcaaatagagtcatacagtagctcaaaaggcaaccataattctctttggtgcaggtcttgggagcgtgatctagattacactgcaccattcccaagttaatcccctgaaaacttactctcaactggagcaaatgaactttggtcccaaatatccatcttttcagtagcgttaattatgctctgtttccaactgcatttcctttccaattgaattaaagtgtggcctcgtttttagtcatttaaaattgttttctaagtaattgctgcctctattatggcacttcaattttgcactgtcttttgagattcaagaaaaatttctattcttttttttgcatccaattgtgcctgaacttttaaaatatgtaaatgctgccatgttccaaacccatcgtcagtgtgtgtgtttagagctgtgcaccctagaaacaacatattgtcccatgagcaggtgcctgagacacagacccctttgcattcacagagaggtcattggttatagagacttgaattaataagtgacattatgccagtttctgttctctcacaggtgataaacaatgctttttgtgcactacatactcttcagtgtagagctcttgttttatgggaaaaggctcaaatgccaaattgtgtttgatggattaatatgcccttttgccgatgcatactattactgatgtgactcggttttgtcgcagctttgctttgtttaatgaaacacacttgtaaacctcttttgcactttgaaaaagaatccagcgggatgctcgagcacctgtaaacaattttctcaacctatttgatgttcaaataaagaattaaactaaa

SEQ ID NO: 42 - protein, 595 aa, Homo sapiens [sequence omitted]

SEQ ID NO: 43 - DNA, 20065 bp, Homo sapiens
ggcgcaacgctgagcagctggcgcgtcccgcgcggccccagttctgcgcagcttcccgaggctccgcaccagccgcgcttctgtccgcctgcaggtagggagcgttgttcctccgcgggtgcccacggcccagtatctctggctagctcgctgggcactttaggacggagggtctctacaccctttctttgggatggagagaggagaagggaaagggaacgcgatggtctagggggcagtagagccaattacctgttggggttaataagaacaggcaatgcatctggccttcctccaggcgcgattcagttttgctctaaaaataatttatacctctaaaaataaataagataggtagtataggataggtagtcattcttatgcgactgtgtgttcagaatatagctctgatgctaggctggaggtctggacacgggtccaagtccaccgccagctgcttgctagtaacatgacttgtgtaagttatcccagctgcagcatctaagtaagtctcttcctgcgctaagcaggtccaggatccctgaacggaatttatttgctctgtccattctgagaacccaaaggagtcctaaaagaggaatggaggagcctaagaataaaaatagtataataaaacatttcttagacacattgaccttggcctatgtcaaagttcagtctgggtttgtcttataacacaaggagtaaaagtaccattgttctacctctttttttaatacttgaaaaaaatttactgtggatgcttttctatgaattaaataaccttctaaaaaatgttttcattgctgcattcgattagattgggtaactaaatgaaattaattcctcactgttgggtataaaggttatttacagtggttctgtcttagccattcactgaactcattgcatatatatctctggaatattgctgattgtttccttcaagtaaacttagaagtgtaactacttagtcaaagagcctgaatattttaaaggccttttgaagaaaactgaaaatgctttccagaaaggatgtatcagttgacaatgacagtcgtcaacagtatttaaggagaactatgatactctgaagaaaaacttagcctttctcagtaaaagtaggtaggcagaggccacatgacagcagttagagtgtggtcttcaaggaagtcacagaaatactgtggggaattgaaaccccatgtggaaaatgtacaagagtgtctcagtgtgactgagaaggaggttgggcatggggtttcatggagtttaataaagtttggtcacttagtagaggtttaataaatcaactgtcttaatctttgatcctacttaagaattttttttttgtttttgtagagatggggctcttgttatgttgcccaggctgttctcgaactcctagcctcaggcgatcctccctcctcaggctccagaagtcctgggattactggcgggagccaccatgcaggcctcttgctcctacttttgagaaaggaagtttaaccggttttttttgtctttttttttttttttttgagacagagtctcactctgttgcccatgctggagtgcagtggtgcaatctcagctcactgcctcccgggttcaagtgattctcctgcctcagcctcccgagtagctgggactacaggcacctgccaccacgcccagctaatttttgtatttttagtagaaatggggtttcaccatattggccaggctgatctcgaactcctgacctcaggtgatccgcctgcctcggcctcccaaagtgctgggattacaggcatgagccactgctcctggctgcttaactttttctctatctcatcctcctacccatcctacccttggaagatagagaagtagtattagttccatagtgttatactgggcttcccccagggacaaacccacttccccaacctgaatgagccatcacttcttccccagtttacatttcattgctctttaaatgtctccattcggatatgggaattcacatatggtcataattcttacctgaagaagatgtcagtcttcttctcttagaccaactgccctgatatgaggtttagaggttaaagaacatgtgtgtatttacatgatctttgtattctgccttttcgtccctcactaatgacagctgcaccccaaggaaatggagctgtggaagagagggtttgataagaaattaagtaaatattggatctaatccatcaccctccaggaagcctttattactcctaaaaatttcaaccaaattcattaaaggacaagaactccaccagagtaggccataaacattggcaaaattagttgtaatccatgactagatttaatgtccctttgttttattcccatatggttataatgctttgcttggcattaggggtattttaagttttcttctgcctagtaagtgaatttgtgtttataatacaataatcataaaatatcacattaatattttataactgtacagttataaaatattttataagtaatatttatattttataagtaatattttataactgtacagttaactctggcccaaggaaaagatagtctgatagatgctgcagccccattttagcaaatgtgacctcacaggcctgaatgccatcgctattccacatctacaggatagacggaaaggaaagaaataaaaaaataggtacctaacactggcaagaggatgatgactcatgttatttcacttaacctttttatcttttaacatgaaggactcatacaggttgataagaaaccagtgacataaacagaccaaaaaatgatcagatctttcaaattagcaaaaaaataatattttttaaacaatgggtgaaaatacagtgtaacagtaccaattatcaacatgtgttgagaaccagaaaaatgttctttttctttgatcagcaacactatttgggaaaatctatcctcagggcctagcctggggccctggcacacagtaggcactcaacgaatatttgctgaacacacaaatacttatgatattttaaaaaattggcaacaatctgatacctaacaatagagggattaaatattatggaactgttaaataagatgcttatgaataccatgcagtaagatgggcaatatttatgccataagctttaatgaaacaaatgggtattaaatgtatgataaggttataaattactttttaaaagattacagggaaaaaaattgaaagatatacactgaaatgttttttgctcacagtggtgacaaggtttctcagcactggcactgttgacgttttaggctgtatgtctttgctgtgggaggctggcctgtgcactgcagggtgtttggcagcactcttggcctctgcccctagatagcaatagcagtcctccctcaaccagcccaattttgacaaccaaaaatgtttccaggcatcaccagatgctccctgggtgagagtgatgaaatagtaggggattttccccttcttttcttattttctgtaattccattatattactttaataataaagaaaaaaacataaaaaataaacgaatgttattattctacgtcagtttggatgtttggactccattttggggttctttccattatatcacttggtctgctaaacattctacggtttggtaaggtgaagtgattcatgaaattttggttttatttttttcctgatactaaaaataaaacattctttcacttggaaatttggacacagaacaccaaaaaaaatccataatctcatctctctttttctgtcttttccttccttttttccctttaaaaacaataaagagtgaaacctacctgttctccctctaatttaattcctaaatataatcactgtcaatatcttggacatttcctgtgtctaaacacacacacacacttttttttttcagcaaaagtggatttctgctacatgtagtgttctgcaacttactttctatgtgtttacaaaatcagtacatgtacatatgctgaattcagtccttaatggtattatattttgtgaatataccaaaatttgtttaaccacttagacaatctaggatattctcagtttgctgttatgagcaatgctcttcctttacatatacagacatatatatatatatgtgtgtgtgtgtgtttttgttttagtaggatagatttctaggagagggtgaaaggtcttatgacatccgcatttacgattgtaataggaagtatcaaagtgccccctaaagaaaaaaatcctcccattagtgggtaagaaagcctatttgttcatatcttcacaaacactaaatattagaaatatttacaattgtggtcaagctcataagtgaaaatggtatttcatatcttatattttttattgtgagattgaacatctttcatatgtttacatgtcacctgtatttcttattctctgaactatatgttatgacctttcactttttttcctcatgggttatgtgtagtttgtatagttgtcttattgattgttaggagctatttatatattaggaacattaatctcctgtcttatatatacgtggcatcgattagttgatcatttgtgagttcatgtctgtatacaaagattggagaggcactaagagggaaaacttacctctttcttatcaaagtttgtaaatatatgtataacagaagagggagaaaatattaataaatgcacagattggctgaaatagagtataaatcttttactcccctacttcaacataaactgcaaaaggagagtgacttttctttcactctgacttccgtattcctcatgcttaaaatagtgcctagcacagaagaggtgctcaatcagtgtttgctaaacgaaataattagtcacatttcaagcaggatgactaaatgaagaatagaatctaggcagatactctggaagagtggctgtgagtcattcatatcttagtatgaattagtcaaatccaactctctccccttcccactccccactgttagtagaagaatctgtttattgagagaatagatttataatttagaataagtgagaggggcagaagaggagattttgaaggatggcacctgaaggaggactagcatggctgagacagtgaagtggaagccttgaatagctaaagggtaagatgaaagtatttagctgtagggggaaaaagcattgacaggttggaaaagtaaaagtcagattctccttgctctgaaattttgtacagggcaggttctactaggtatgttacaatgcagaaaaaacatgaaataattgagaggaatttggtgcaatattatcttcttggcttcttttgagtgggcagatttttttcacggcctgtaactataataaatttgaaacttctcatcttttagtaacttttttcacttaagtttatgtggctgtgggcaatggaatgaagatattgaacttccaattccctgttgggtttccacaattacaagtcaatcatgactggttattagaagactatttcagttagaaccaccaagtcccatattgtcatattgtatgtttaattattaagtgaagcagtcttcttttcgtgttttccataattagggcattccagaaagatgaggatatttgctgtctttatattcatgacctactggcatttgctgaacggtaagacaccaaatccttccattaggttctatattttaaatattttaaccatgagtttaaaactaaaatgatcatttaaaatgcatgcaattttcttatagagagaacattctattctttcttctactttacacaatggcaaagtcttctttctactttacgcaatgataaagttacctgtgtcattttgtaaaaatatagagaatatagacaaattgaaagacacaaaataatctattacccatttcccagggttaactactgaaaatatctggggaaatggcctgtatgtatacatttatttgtttgctttcaacaaggccaagatcctttgatctttcagtcttggttgctctgtgacatgcctttcctgatgaggatactttaaggaagaattgtaagatacatggaaaatgtcaggctaacacagtactggcatcaccctgtgctctttcctgaactccataccaatgtacttcttgccagaaaactgatcaaaagtttagggaagtaaaaagagatgactgttagaatctaccattccctctatgtaggaagcaaataggtgtcctgtcaaaggacattctggggatgtctacatgaaaccaactctccctggttgtaaggactccatctccatataatatttatacagtaatatatgtttataaattgtgggggcaacttgtttagctaattttattattctgctattgggacactgtgtctcagcatgagatatagtgtcccaaaacatatttcaagcccattggataaaatatgtgtttagcaagttcttaaatataatgataacataaccgaccagataaagtgatttataaacgctgtgccaattttgtaaatgtttcgaggaattttcccttttctgaagattgtccttctttctttttagcatttactgtcacggttcccaaggacctatatgtggtagagtatggtagcaatatgacaattgaatgcaaattcccagtagaaaaacaattagacctggctgcactaattgtctattgggaaatggaggataagaacattattcaatttgtgcatggagaggaagacctgaaggttcagcatagtagctacagacagagggcccggctgttgaaggaccagctctccctgggaaatgctgcacttcagatcacagatgtgaaattgcaggatgcaggggtgtaccgctgcatgatcagctatggtggtgccgactacaagcgaattactgtgaaagtcaatggtaagaattattatagatgagaggcctgatctttattgaaaacatattccaagtgttgaagacttttcattcttgtaagtccatacttattttcaaacagaacagcatagtctgttcattcattcattcaattcatgaattcattcacataattatccaatttcttgagcacctatttgatagtcactggaaatccagagacaaacaacacagagccatgttctacagtatgtacagttttccaaaaagaatttctagtctttacttttttattacaaatggaatacgtatacttgcaaataattcagatactgtggaagagatcaaatgaattgcaaaagtgtccctcctcccttcaccactatctcccatggcatgcagagagagtaaccattatttgtgtgtccctccagaaatttttttattcaactactatttttttattttattaggtccgtcagttttccttttttgagcctctctatatcaaatgcaaataaatatattcagaacaaaccccactgtaaggttcacattaaaaaagacttgaagtcaccctatgaagacaaaaaataatcacattaagtgtgaaagaacctattcttccagtacaggataagccatacttactgggcatatattcatcttgaaaatctatactgatgttgtcttggggaattgaaaaggaactaggagtgttagttcctcggtattgacccacagttatgttatcaggtcacttgagttcaaagttttgtgttggcactagctaagtaaaggaaaacacctctgctttcattgttgagtttcacagaattgagagctgaaaggatcccaggcaggagcagctaatccaaactcccacaaagaacaaaaatcccccagaggatcttctgttcttatatttcctgcaatggcgtccctgtcatatcccacaatggcctccctgccatttggatatcccttccatatcctgttgaaattactccctaatagtaagctgaaatctgcccctctagttgtagtcttgggattatttcatttacatgatgaccttttaatatttgactagaattaaatcatctccccttggtctttccattcctgggctaactaccatcaatctgagggctaacaatacaagtagaaaaagtatacatttgtcactgatcactgatcaattattaatcaatgatcactgataactataaactcaaaaacaaaatcatgtggggattaagagaaatgtatcagttttatgttgtatttctggtccctgatactggctcaggtaatgccactattgtcaagaagataccacttgtaaagtagatttaattttcattatattttaccatatgcttctccattcatgacatctcttgagatgttgtggtttatactttcagtttttctccagtccatccgcaaatatcaggcatctactgtgttccaagatattaaagaaatcatcatgacttagcctcatcaacagcattgctagatctgggatggaaaggaagagtataatcctggcagtcaggaagaaggcagcataaagtataagtttctgcttccaaaaaaggtctctcatcagcctgtagggagtgtgtagggaagggacagctgtccttgtagtagggaagggttttattcaggtcgtctgggctccataatatcccttgtgtatctgcagtctcctttgccatggatcaacacaataggaaatcttccggcactgatggtttttccaagggggagttcttcctggagcaaagcaaatgaccaaccaggtttgaggacctgatttgtttgacaattccattttgtattgtaaattacttaattggcattctactcccaatccatcttgtcatttgcatacagtggttttgggattgagttcagctataccaaaagtctgaaccttctgcacttagaacaaggcaaccaccaagcttcacttgcactgaggccgtgtctccaatggaaatgaggcagctggcttgcaggagcttcccaactcagggaagtagaactcctgagtcacctccatatgcaaatgatttcacagtaatgctgttgaacttcacttcccatcacagcaaatgtgtggtaacatagcttccccacaggagtttactcaccatggtattttaaaggtgaaacatttcaaaactgaaatttgaaagaatttagttttggattcactcaattatcactatcacttcgggtgttattgcacctttcttgtttgtgagtttaaatgccagactctcaggccactaactttcaattaaaagtgtttttctttaatcgctgaacctaacagcagggaaaacgaaatgttcattcagactttcagaaccttcaatgagattaggcagctgaaagatcaaagtgttgcatagttgtcccgataaagctatttggatcatatggaccaaatcgactgctgtcattccccaccaaccccatctctccccaaaattcccagccctgtttaagtgttctctgtagcatttatctctatctagtatattgtgtagcatatcatatcatacttttctgttttgtttattgtctctctcctcctagaatataaactccacaagcacaaagatttgggcctgttttataatattgttgcatccccagggcctgatatacagcagagtggtggtacgaaaagagcacacaaaaaaatatttgttgagtcaatgaatgaatgatttcctcaaataggattagcctaaaattttggaaacatgaacagatttggatatgtgaaaatttatttccagactgttcatcaggaactgttagcagcttctaaagggtacactggagcagcagtagtaaaaggaggaagaggagcagctctgctactgctactatcgagtactactacaattagcacttgcttattctgtgtgttaggccctgtactgaacactctgtctaaattagttcatttcctcctggaaatgactctagggggtaagtgcttcatcatgtaagatgagtatttttcacattttgttgtgtctgaaatctgagtgtgtctttcaatgatggaatctttgattccatgataagtggtattattcccattttaaggatgaggaaactgaggtccaaagaaattaagtaatttgcccaaattcacccagcctagaaaatgataaagctagttctaaacccaagcagattagctctgaagtctgggcccttaataaccactttttattgcctatatttgtacctctggtgtacgtatcaagttatatgttgacttcaaaactatcatgaccttttcttggttttgattgtccaacattagtatagtgttctgggtctgcaaaaattttgattactcatctcatctgtaaaacattttgaactcgtgtgtttgtgcatgcacatttgtgtgtaattataaaaattttactttctgttaatatataagttgtatcataagaaactgccgtttttgaagagcaaaaaaaggttgaatgttaccagttacatctggttcaacctaatagacatttgtacaaaaacagacattttaagaggttgaaataaaaatttaataaacaatattttcagtttttactaattgtgatgcttcactatcattagctaatatgtcaaggcataatataccttagggtgaactttatcattaacaaaggtggatggtgtcaataatcttgaggtttgtgtttttttatataacactgcgaggtctaattaagtacttactgtttaccacctcatacagtggccgataaaaagtgtcacttctgctgtttcctctgggttgtgcttgaattattagtattatcttcagtcctcagtttctttgtgggaaactttttaattagttgtttaattttgtaagatggttagtttagtcaaaattagataagagaatttgaaaatccgtagctaccccaaagcaacctacacataagaactattatttttgtgttttgaaatcataattttattgatttccagtgtttccactggtagtggtttcattgatataggagtatcaaaacatcactcattatttatttcagtttcatttgatcctagccgttttgtattaactctctgtgaagaaattacctcacaaatctattgctgtccttggtaaaggaatggagaattaaggctctagatcattagtggttacactatagtattagaagtaaaaaaaagattataccaacaaaataagaacatgttaatgtacttgtaatgaataaacatgaataaagctcttatgctatataggtgcactaaacaatctactagaattgtcagcaaactacgtatcttaatcctgaaagggtcccaaaccaatgatctaaaattgaatcaaactttcttccttgagcataattacttaaatgatttattaaaatagccagcatttaaaagcttaaaatgtaaatatcataatgtggtatcctagatagcatcccagaacagaaaaaggatattagggaaaaactggaggaatggaataaattatgcagtttagttattaataatgtactaacgtccttagttatgacgattgtaccatggtaatgtaagatactaacaatagaggaaaccgggtaaggagtatacagtaactctatactatctttgcaacttttttgtaaatttaaaacttctaaaataaagaacaaatttaaacattaaaaagtatcaccaggaacatatatcactgtttacagatgaaatactatgtattttcatatctaatttctgatcattgacttcaaatcagaaaagtgaatgacacctcaaaatcaggttttctgtttactgaagtctaagaaaagaaagcataccagctggagagattcatgtttataaagacagatttataacaacaaaaataaaatatccaagaataaatttaagaagaagcactttactgagaaacatatgaaaacctgaacaaatggagagggatattttgtatttgaatagaaagacttctggtttaaagataattctctttaaattattttttgtagaaatttaaggggtacaagagcagtgttgtcacatggatatattacatagtggtgaagtctggggttttagtgtaaattaatctttacattttgtttgagcccaataaatgtaccaacatgatttttatagaaagatagtcattcctattaatccaaacttgtcccaactttgaattgaattgaggcagagctagcaggtgttccccacggctgaggcatctgaacattaagcatatccctctgagaaccagcctgcattgatactctttctaatgtggacagcatcaagctatgtacgtagttctgtgctcagcaaaagccctgacttctttttgtttatgtcctagccccatacaacaaaatcaaccaaagaattttggttgtggatccagtcacctctgaacatgaactgacatgtcaggctgagggctaccccaaggccgaagtcatctggacaagcagtgaccatcaagtcctgagtggtaagaccaccaccaccaattccaagagagaggagaagcttttcaatgtgaccagcacactgagaatcaacacaacaactaatgagattttctactgcacttttaggagattagatcctgaggaaaaccatacagctgaattggtcatcccaggtaatattctgaatgtgtccattaaaatatgtctaacactgtcccctagcacctagcatgatgtctgcctatcatagtcattcagtgattgttgaataaatgaatgaatgaataacactatgtttacaaaatatatcctaattcctcacctccattcatccaaaccatattgttacttaataaacattcagcagatatttatggaatataccttttgttccatgcattgtagtactcattggatacacatagaataataagactcagttcacactcttcaggaaacagataaaaaactaagaaacaaacaaaaaacaggcaatccaacaccatgtgggaaatgctttcatagccgggaaacctggggaatacctgagaggaatactcaattcaggccttgtttcaggaatccaaatcctggcacatcagagctgcttccctctttccagggtggcaggaaataaatggaacatatttttctatcttatgccaaacatgagggaccctttctccccggtgcctctcccaaggtagtctacaatatttcaactctagcagtctgcttagtgcatagaacatgaggctgtgtgtccctgggcaaattactagacttctgtgtgcttcactttccctgtaggattataatctactgagcaagcttattgtaagggtcagattagcaacagtgtatgaaaatgatttgagaccattgcctgcacaaattcaactatttttttttatctcactactctacagaagtaggtagggtgggagacagagtctgatgagaggctcagaatgtgaaagaaagtgaggcgagtgagcatgatatttaatataaacacaaagatattctgagaagagctgctcactgccccctcccccaatacatgttgataggaaaatgccacgtacttcagcaaaaacaactgaaaaattagatagaaaagtcaatcaataggaaaagataatccaggacggtgttgtgaacagaaagagggggaaaaaactttagaaaatgatggggatgctcttactggggtacgagtcctcaggtattgaactggctttcagtaaaagctagattagtgggttcctgccatttacaagctgttttatgacaacttacttgttgggtggcctacagtaactcacctaactgcactgagtctgtttcctcatctgtaaattggggatttttttttaaatacctggcatgcctaactcataaagttgttctgaaactgaaataaaacatacgtgaacaggcattgtaaactgtaagttacggaaaaagctggctgttgttgtgtctttaaagtttcacctgggtagtcaaagatggatcatgggtctcagtggagagctgagccaggcaggagctgactaagggtgagaggtgggagttagcagcctctgaacatctgtgtaccatgggaccccctttcctcctgcatggtaccccagacaaggagcctagtaagagatactaatggcttgttgtccagagatgttcaaactgcagagaaagataagacaacaagcattggcctccaatcatgatgacagataggaggaggtgggagctccttagcagtgctggttggccttccatgttctactgtgggccatctctgccatgtactgtaggctactagcttctatattaaagaatgcaagaggggccaggagcggaggctcatgcctgtaatctcagcactttgggaggccaaggtgggcagatcacttgaggtcaggagtttgtgaccagcctggccaacatggtgaaactctgcctttactaaaaatataaaaattagctgggtgtggtggtgtgcacctgtaatcccagctactcgggagactgaggcacaagaattgcttgaacctgggaggcggaagttgcagtgagcccagattgcgccactgcactccaccctgggcaacagagaaagactctgcctcaaaaaaaaaaaaaaaaagcaagaggaagtgaaataatcaaggccgccatttaatagtgagcagccactccatgtggtactgtgcaagcacattataaatattagcctcacaagaaatgtattagcatttgtattttgtacactggttaagtatcttgcccaagacctcaaaactggttaagggcagcagaatttagccccagcaccaccttttcaaagcctgggcttctcacacttctccatgctgttcccattttaacacaggtatctcgccattccagccactcaaactttggcatttaagaaaattatcctaaagctaaactaaacttcaaggatgaccattctcctgaccccttcccatcaaaattttatctttagtcagtttgttttcgttttgttttgtttttcagaactacctctggcacatcctccaaatgaaaggactcacttggtaattctgggagccatcttattatgccttggtgtagcactgacattcatcttccgtttaagaaaaggtagtatttccttaattgcagtggtctccactgggggtgaggaaggggtgagaattggatcatggctgcaaggaaacccgacttaacctctgcaaggtggtgcaaaggcattccactgttcaacagcaattatattgaagctgagtgggatcactgggtgaagatgaagcgtaaggggtgaggggcaggagaatgggtatggatggaggtagaagatgcagtgtcatacagtttttttctatcatgaaaataaccacagacttacagaagagaaagagctaaaatgcccgtcattttcagttgcattttagtcttgcattagttgcaaccagctggtttctgggtaccctaagtaataaaaatagttcctctgtagaactgtagtatgtttaccatagagtattttgcaaaatttttggtagaggatgttacataatttgcatgtgttcatttctccatttacctgtgggaacaattaaaatccaggaaaatgagtatattcaaataatttcctcccatttaagatgagtcagagtaaataattcctccaatacttagagaagtataccaagagatccagtgatggtatagagttgtctgatgttaaatagggaagtagaatatggaaggggattccaatagtcgttgaaaaattccccataaccccttacatgggggaaagtagtgttaactgagagagtagagataagctgtttccaaaaattatattcttaacaggactgagatagccagaatataaggatcaagtttcaatgacagtaagatcctgagatggagttgatttgcacaaagaaataattgttgccagcatgcattttgaatatttctctggaaaaaaagattagttggcagtagaaatggatagaaatcaatagatattaaaatacctcagaatttggttcatctctgggaaaagatgaaaaataaaagtgtatactcctcaagaacatctaggatcaaaagcatgtgccctacactattgaattaattaacctcataagttgggacctgtggaataaggatgtccaccagacttcctagggattacaaatgtttcacagaacttgaaatttaaacttgggtcactgtatgggatgtagagctgtgctatatggaaataaaaatgatttctttttctcaagggagaatgatggatgtgaaaaaatgtggcatccaagatacaaactcaaagaagcaaagtggtaagaatatcagaaggaattgggaagtaaaagtcaaaggaaacaaaaagctaaagcaataacaaagagaaatccatcagtcataatctcctctccttttaaagaatgctggttcccctttgcctcacagctaacacaagaactcctccaccgtctgaggaggtttaggagcagggaaggggaaggagtcagcttcatttgctaatcttctgttgccctgcaccctagcagctccttgcagcaggggacaaggatgacttaggtggatggataattaattgattctaaaatattgtgtgtcagtattgtaatactatgttaattgcaccatgcacggtatctcatttaatcccccaccccttgccattaccaaagagagagagagagagagagagagaaatactagaatttatcctcattttacagtagagaaaacagagggtcaagaagataatgtaaagtgcccaagaacacacagctgatcacaaaaatcaagcttgggggccattagcctaaccacagacccttactcttaacccatctgcttcaatccattttgctacaaatgtttacatttataagcagggcagaaaaacctcatccaggttattgaactaagaagaaagttatattaaggtttctaatttttttaatgtagttagaaaccaaacttaacaatgagcccaagtttaaagcagtctaattaacctggacaagctcaggcaagtttcattctgtggcccatagcatcatctgtgttgtaaagctaagtagcaaatgttgtttgggtcatgctgggggacaagccatcccaatttgctcaggactgaggggttttccaggatatcatgtaaggataattgggtacaaatataacctgctgctttctctcatttcaaatttatcatttatcatatcagcaactatgagttatgttttttattagatttcttgttactttttccccagaccacttcccatgaaattaatatactattatcactctccagatacacatttggaggagacgtaatccagcattggaacttctgatcttcaagcagggattctcaacctgtggtttaggggttcatcggggctgagcgtgacaagaggaaggaatgggcccgtgggatgcaggcaatgtgggacttaaaaggcccaagcactgaaaatggaacctggcgaaagcagaggaggagaatgaagaaagatggagtcaaacagggagcctggagggagaccttgatactttcaaatgcctgaggggctcatcgacgcctgtgacagggagaaaggatacttctgaacaaggagcctccaagcaaatcatccattgctcatcctaggaagacgggttgagaatccctaatttgagggtcagttcctgcagaagtgccctttgcctccactcaatgcctcaatttgttttctgcatgactgagagtctcagtgttggaacgggacagtatttatgtatgagtttttcctatttattttgagtctgtgaggtcttcttgtcatgtgagtgtggttgtgaatgatttcttttgaagatatattgtagtagatgttacaattttgtcgccaaactaaacttgctgcttaatgatttgctcacatctagtaaaacatggagtatttgtaaggtgcttggtctcctctataactacaagtatacattggaagcataaagatcaaaccgttggttgcataggatgtcacctttatttaacccattaatactctggttgacctaatcttattctcagacctcaagtgtctgtgcagtatctgttccatttaaatatcagctttacaattatgtggtagcctacacacataatctcatttcatcgctgtaaccaccctgttgtgataaccactattattttacccatcgtacagctgaggaagcaaacagattaagtaacttgcccaaaccagtaaatagcagacctcagactgccacccactgtccttttataatacaatttacagctatattttactttaagcaattcttttattcaaaaaccatttattaagtgcccttgcaatatcaatcgctgtgccaggcattgaatctacagatgtgagcaagacaaagtacctgtcctcaaggagctcatagtataatgaggagattaacaagaaaatgtattattacaatttagtccagtgtcatagcataaggatgatgcgaggggaaaacccgagcagtgttgccaagaggaggaaataggccaatgtggtctgggacggttggatatacttaaacatcttaataatcagagtaattttcatttacaaagagaggtcggtacttaaaataaccctgaaaaataacactggaattccttttctagcattatatttattcctgatttgcctttgccatataatctaatgcttgtttatatagtgtctggtattgtttaacagttctgtcttttctatttaaatgccactaaattttaaattcatacctttccatgattcaaaattcaaaagatcccatgggagatggttggaaaatctccacttcatcctccaagccattcaagtttcctttccagaagcaactgctactgcctttcattcatatgttcttctaaagatagtctacatttggaaatgtatgttaaaagcacgtatttttaaaatttttttcctaaatagtaacacattgtatgtctgctgtgtactttgctatttttatttattttagtgtttcttatatagcagatggaatgaatttgaagttcccagggctgaggatccatgccttctttgtttctaagttatctttcccatagcttttcattatctttcatatgatccagtatatgttaaatatgtcctacatatacatttagacaaccaccatttgttaagtatttgctctaggacagagtttggatttgtttatgtttgctcaaaaggagacccatgggctctccagggtgcactgagtcaatctagtcctaaaaagcaatcttattattaactctgtatgacagaatcatgtctggaacttttgttttctgctttctgtcaagtataaacttcactttgatgctgtacttgcaaaatcacattttctttctggaaattccggcagtgtaccttgactgctagctaccctgtgccagaaaagcctcattcgttgtgcttgaacccttgaatgccaccagctgtcatcactacacagccctcctaagaggcttcctggaggtttcgagattcagatgccctgggagatcccagagtttcctttccctcttggccatattctggtgtcaatgacaaggagtaccttggctttgccacatgtcaaggctgaagaaacagtgtctccaacagagctccttgtgttatctgtttgtacatgtgcatttgtacagtaattggtgtgacagtgttctttgtgtgaattacaggcaagaattgtggctgagcaaggcacatagtctactcagtctattcctaagtcctaactcctccttgtggtgttggatttgtaaggcactttatcccttttgtctcatgtttcatcgtaaatggcataggcagagatgatacctaattctgcatttgattgtcactttttgtacctgcattaatttaataaaatattcttatttattttgttacttggtacaccagcatgtccattttcttgtttattttgtgtttaataaaatgttcagtttaacatcccagtggagaaagtta

SEQ ID NO: 44 - DNA, 3691 bp, Homo sapiens
ggcgcaacgctgagcagctggcgcgtcccgcgcggccccagttctgcgcagcttcccgaggctccgcaccagccgcgcttctgtccgcctgcagggcattccagaaagatgaggatatttgctgtctttatattcatgacctactggcatttgctgaacgcatttactgtcacggttcccaaggacctatatgtggtagagtatggtagcaatatgacaattgaatgcaaattcccagtagaaaaacaattagacctggctgcactaattgtctattgggaaatggaggataagaacattattcaatttgtgcatggagaggaagacctgaaggttcagcatagtagctacagacagagggcccggctgttgaaggaccagctctccctgggaaatgctgcacttcagatcacagatgtgaaattgcaggatgcaggggtgtaccgctgcatgatcagctatggtggtgccgactacaagcgaattactgtgaaagtcaatgccccatacaacaaaatcaaccaaagaattttggttgtggatccagtcacctctgaacatgaactgacatgtcaggctgagggctaccccaaggccgaagtcatctggacaagcagtgaccatcaagtcctgagtggtaagaccaccaccaccaattccaagagagaggagaagcttttcaatgtgaccagcacactgagaatcaacacaacaactaatgagattttctactgcacttttaggagattagatcctgaggaaaaccatacagctgaattggtcatcccagaactacctctggcacatcctccaaatgaaaggactcacttggtaattctgggagccatcttattatgccttggtgtagcactgacattcatcttccgtttaagaaaagggagaatgatggatgtgaaaaaatgtggcatccaagatacaaactcaaagaagcaaagtgatacacatttggaggagacgtaatccagcattggaacttctgatcttcaagcagggattctcaacctgtggtttaggggttcatcggggctgagcgtgacaagaggaaggaatgggcccgtgggatgcaggcaatgtgggacttaaaaggcccaagcactgaaaatggaacctggcgaaagcagaggaggagaatgaagaaagatggagtcaaacagggagcctggagggagaccttgatactttcaaatgcctgaggggctcatcgacgcctgtgacagggagaaaggatacttctgaacaaggagcctccaagcaaatcatccattgctcatcctaggaagacgggttgagaatccctaatttgagggtcagttcctgcagaagtgccctttgcctccactcaatgcctcaatttgttttctgcatgactgagagtctcagtgttggaacgggacagtatttatgtatgagtttttcctatttattttgagtctgtgaggtcttcttgtcatgtgagtgtggttgtgaatgatttcttttgaagatatattgtagtagatgttacaattttgtcgccaaactaaacttgctgcttaatgatttgctcacatctagtaaaacatggagtatttgtaaggtgcttggtctcctctataactacaagtatacattggaagcataaagatcaaaccgttggttgcataggatgtcacctttatttaacccattaatactctggttgacctaatcttattctcagacctcaagtgtctgtgcagtatctgttccatttaaatatcagctttacaattatgtggtagcctacacacataatctcatttcatcgctgtaaccaccctgttgtgataaccactattattttacccatcgtacagctgaggaagcaaacagattaagtaacttgcccaaaccagtaaatagcagacctcagactgccacccactgtccttttataatacaatttacagctatattttactttaagcaattcttttattcaaaaaccatttattaagtgcccttgcaatatcaatcgctgtgccaggcattgaatctacagatgtgagcaagacaaagtacctgtcctcaaggagctcatagtataatgaggagattaacaagaaaatgtattattacaatttagtccagtgtcatagcataaggatgatgcgaggggaaaacccgagcagtgttgccaagaggaggaaataggccaatgtggtctgggacggttggatatacttaaacatcttaataatcagagtaattttcatttacaaagagaggtcggtacttaaaataaccctgaaaaataacactggaattccttttctagcattatatttattcctgatttgcctttgccatataatctaatgcttgtttatatagtgtctggtattgtttaacagttctgtcttttctatttaaatgccactaaattttaaattcatacctttccatgattcaaaattcaaaagatcccatgggagatggttggaaaatctccacttcatcctccaagccattcaagtttcctttccagaagcaactgctactgcctttcattcatatgttcttctaaagatagtctacatttggaaatgtatgttaaaagcacgtatttttaaaatttttttcctaaatagtaacacattgtatgtctgctgtgtactttgctatttttatttattttagtgtttcttatatagcagatggaatgaatttgaagttcccagggctgaggatccatgccttctttgtttctaagttatctttcccatagcttttcattatctttcatatgatccagtatatgttaaatatgtcctacatatacatttagacaaccaccatttgttaagtatttgctctaggacagagtttggatttgtttatgtttgctcaaaaggagacccatgggctctccagggtgcactgagtcaatctagtcctaaaaagcaatcttattattaactctgtatgacagaatcatgtctggaacttttgttttctgctttctgtcaagtataaacttcactttgatgctgtacttgcaaaatcacattttctttctggaaattccggcagtgtaccttgactgctagctaccctgtgccagaaaagcctcattcgttgtgcttgaacccttgaatgccaccagctgtcatcactacacagccctcctaagaggcttcctggaggtttcgagattcagatgccctgggagatcccagagtttcctttccctcttggccatattctggtgtcaatgacaaggagtaccttggctttgccacatgtcaaggctgaagaaacagtgtctccaacagagctccttgtgttatctgtttgtacatgtgcatttgtacagtaattggtgtgacagtgttctttgtgtgaattacaggcaagaattgtggctgagcaaggcacatagtctactcagtctattcctaagtcctaactcctccttgtggtgttggatttgtaaggcactttatcccttttgtctcatgtttcatcgtaaatggcataggcagagatgatacctaattctgcatttgattgtcactttttgtacctgcattaatttaataaaatattcttatttattttgttacttggtacaccagcatgtccattttcttgtttattttgtgtttaataaaatgttcagtttaacatcccagtggagaaagttaaaaaa

SEQ ID NO: 45 - protein, 290 aa, Homo sapiens
MRIFAVFIFMTYWHLLNAFTVTVPKDLYVVEYGSNMTIECKFPVEKQLDLAALIVYWEMEDKNIIQFVHGEEDLKVQHSSYRQRARLLKDQLSLGNAALQITDVKLQDAGVYRCMISYGGADYKRITVKVNAPYNKINQRILVVDPVTSEHELTCQAEGYPKAEVIWTSSDHQVLSGKTTTTNSKREEKLFNVTSTLRINTTTNEIFYCTFRRLDPEENHTAELVIPELPLAHPPNERTHLVILGAILLCLGVALTFIFRLRKGRMMDVKKCGIQDTNSKKQSDTHLEET

SEQ ID NO: 46 - DNA, 3349 bp, Homo sapiens
ggcgcaacgctgagcagctggcgcgtcccgcgcggccccagttctgcgcagcttcccgaggctccgcaccagccgcgcttctgtccgcctgcagggcattccagaaagatgaggatatttgctgtctttatattcatgacctactggcatttgctgaacgccccatacaacaaaatcaaccaaagaattttggttgtggatccagtcacctctgaacatgaactgacatgtcaggctgagggctaccccaaggccgaagtcatctggacaagcagtgaccatcaagtcctgagtggtaagaccaccaccaccaattccaagagagaggagaagcttttcaatgtgaccagcacactgagaatcaacacaacaactaatgagattttctactgcacttttaggagattagatcctgaggaaaaccatacagctgaattggtcatcccagaactacctctggcacatcctccaaatgaaaggactcacttggtaattctgggagccatcttattatgccttggtgtagcactgacattcatcttccgtttaagaaaagggagaatgatggatgtgaaaaaatgtggcatccaagatacaaactcaaagaagcaaagtgatacacatttggaggagacgtaatccagcattggaacttctgatcttcaagcagggattctcaacctgtggtttaggggttcatcggggctgagcgtgacaagaggaaggaatgggcccgtgggatgcaggcaatgtgggacttaaaaggcccaagcactgaaaatggaacctggcgaaagcagaggaggagaatgaagaaagatggagtcaaacagggagcctggagggagaccttgatactttcaaatgcctgaggggctcatcgacgcctgtgacagggagaaaggatacttctgaacaaggagcctccaagcaaatcatccattgctcatcctaggaagacgggttgagaatccctaatttgagggtcagttcctgcagaagtgccctttgcctccactcaatgcctcaatttgttttctgcatgactgagagtctcagtgttggaacgggacagtatttatgtatgagtttttcctatttattttgagtctgtgaggtcttcttgtcatgtgagtgtggttgtgaatgatttcttttgaagatatattgtagtagatgttacaattttgtcgccaaactaaacttgctgcttaatgatttgctcacatctagtaaaacatggagtatttgtaaggtgcttggtctcctctataactacaagtatacattggaagcataaagatcaaaccgttggttgcataggatgtcacctttatttaacccattaatactctggttgacctaatcttattctcagacctcaagtgtctgtgcagtatctgttccatttaaatatcagctttacaattatgtggtagcctacacacataatctcatttcatcgctgtaaccaccctgttgtgataaccactattattttacccatcgtacagctgaggaagcaaacagattaagtaacttgcccaaaccagtaaatagcagacctcagactgccacccactgtccttttataatacaatttacagctatattttactttaagcaattcttttattcaaaaaccatttattaagtgcccttgcaatatcaatcgctgtgccaggcattgaatctacagatgtgagcaagacaaagtacctgtcctcaaggagctcatagtataatgaggagattaacaagaaaatgtattattacaatttagtccagtgtcatagcataaggatgatgcgaggggaaaacccgagcagtgttgccaagaggaggaaataggccaatgtggtctgggacggttggatatacttaaacatcttaataatcagagtaattttcatttacaaagagaggtcggtacttaaaataaccctgaaaaataacactggaattccttttctagcattatatttattcctgatttgcctttgccatataatctaatgcttgtttatatagtgtctggtattgtttaacagttctgtcttttctatttaaatgccactaaattttaaattcatacctttccatgattcaaaattcaaaagatcccatgggagatggttggaaaatctccacttcatcctccaagccattcaagtttcctttccagaagcaactgctactgcctttcattcatatgttcttctaaagatagtctacatttggaaatgtatgttaaaagcacgtatttttaaaatttttttcctaaatagtaacacattgtatgtctgctgtgtactttgctatttttatttattttagtgtttcttatatagcagatggaatgaatttgaagttcccagggctgaggatccatgccttctttgtttctaagttatctttcccatagcttttcattatctttcatatgatccagtatatgttaaatatgtcctacatatacatttagacaaccaccatttgttaagtatttgctctaggacagagtttggatttgtttatgtttgctcaaaaggagacccatgggctctccagggtgcactgagtcaatctagtcctaaaaagcaatcttattattaactctgtatgacagaatcatgtctggaacttttgttttctgctttctgtcaagtataaacttcactttgatgctgtacttgcaaaatcacattttctttctggaaattccggcagtgtaccttgactgctagctaccctgtgccagaaaagcctcattcgttgtgcttgaacccttgaatgccaccagctgtcatcactacacagccctcctaagaggcttcctggaggtttcgagattcagatgccctgggagatcccagagtttcctttccctcttggccatattctggtgtcaatgacaaggagtaccttggctttgccacatgtcaaggctgaagaaacagtgtctccaacagagctccttgtgttatctgtttgtacatgtgcatttgtacagtaattggtgtgacagtgttctttgtgtgaattacaggcaagaattgtggctgagcaaggcacatagtctactcagtctattcctaagtcctaactcctccttgtggtgttggatttgtaaggcactttatcccttttgtctcatgtttcatcgtaaatggcataggcagagatgatacctaattctgcatttgattgtcactttttgtacctgcattaatttaataaaatattcttatttattttgttacttggtacaccagcatgtccattttcttgtttattttgtgtttaataaaatgttcagtttaacatcccagtggagaaagttaaaaaa

SEQ ID NO: 47 - protein, 176 aa, Homo sapiens
MRIFAVFIFMTYWHLLNAPYNKINQRILVVDPVTSEHELTCQAEGYPKAEVIWTSSDHQVLSGKTTTTNSKREEKLFNVTSTLRINTTTNEIFYCTFRRLDPEENHTAELVIPELPLAHPPNERTHLVILGAILLCLGVALTFIFRLRKGRMMDVKKCGIQDTNSKKQSDTHLEET

SEQ ID NO: 48 - DNA, 3518 bp, Homo sapiens
ggcgcaacgctgagcagctggcgcgtcccgcgcggccccagttctgcgcagcttcccgaggctccgcaccagccgcgcttctgtccgcctgcagggcattccagaaagatgaggatatttgctgtctttatattcatgacctactggcatttgctgaacgcatttactgtcacggttcccaaggacctatatgtggtagagtatggtagcaatatgacaattgaatgcaaattcccagtagaaaaacaattagacctggctgcactaattgtctattgggaaatggaggataagaacattattcaatttgtgcatggagaggaagacctgaaggttcagcatagtagctacagacagagggcccggctgttgaaggaccagctctccctgggaaatgctgcacttcagatcacagatgtgaaattgcaggatgcaggggtgtaccgctgcatgatcagctatggtggtgccgactacaagcgaattactgtgaaagtcaatgccccatacaacaaaatcaaccaaagaattttggttgtggatccagtcacctctgaacatgaactgacatgtcaggctgagggctaccccaaggccgaagtcatctggacaagcagtgaccatcaagtcctgagtggagattagatcctgaggaaaaccatacagctgaattggtcatcccagaactacctctggcacatcctccaaatgaaaggactcacttgggagaatgatggatgtgaaaaaatgtggcatccaagatacaaactcaaagaagcaaagtgatacacatttggaggagacgtaatccagcattggaacttctgatcttcaagcagggattctcaacctgtggtttaggggttcatcggggctgagcgtgacaagaggaaggaatgggcccgtgggatgcaggcaatgtgggacttaaaaggcccaagcactgaaaatggaacctggcgaaagcagaggaggagaatgaagaaagatggagtcaaacagggagcctggagggagaccttgatactttcaaatgcctgaggggctcatcgacgcctgtgacagggagaaaggatacttctgaacaaggagcctccaagcaaatcatccattgctcatcctaggaagacgggttgagaatccctaatttgagggtcagttcctgcagaagtgccctttgcctccactcaatgcctcaatttgttttctgcatgactgagagtctcagtgttggaacgggacagtatttatgtatgagtttttcctatttattttgagtctgtgaggtcttcttgtcatgtgagtgtggttgtgaatgatttcttttgaagatatattgtagtagatgttacaattttgtcgccaaactaaacttgctgcttaatgatttgctcacatctagtaaaacatggagtatttgtaaggtgcttggtctcctctataactacaagtatacattggaagcataaagatcaaaccgttggttgcataggatgtcacctttatttaacccattaatactctggttgacctaatcttattctcagacctcaagtgtctgtgcagtatctgttccatttaaatatcagctttacaattatgtggtagcctacacacataatctcatttcatcgctgtaaccaccctgttgtgataaccactattattttacccatcgtacagctgaggaagcaaacagattaagtaacttgcccaaaccagtaaatagcagacctcagactgccacccactgtccttttataatacaatttacagctatattttactttaagcaattcttttattcaaaaaccatttattaagtgcccttgcaatatcaatcgctgtgccaggcattgaatctacagatgtgagcaagacaaagtacctgtcctcaaggagctcatagtataatgaggagattaacaagaaaatgtattattacaatttagtccagtgtcatagcataaggatgatgcgaggggaaaacccgagcagtgttgccaagaggaggaaataggccaatgtggtctgggacggttggatatacttaaacatcttaataatcagagtaattttcatttacaaagagaggtcggtacttaaaataaccctgaaaaataacactggaattccttttctagcattatatttattcctgatttgcctttgccatataatctaatgcttgtttatatagtgtctggtattgtttaacagttctgtcttttctatttaaatgccactaaattttaaattcatacctttccatgattcaaaattcaaaagatcccatgggagatggttggaaaatctccacttcatcctccaagccattcaagtttcctttccagaagcaactgctactgcctttcattcatatgttcttctaaagatagtctacatttggaaatgtatgttaaaagcacgtatttttaaaatttttttcctaaatagtaacacattgtatgtctgctgtgtactttgctatttttatttattttagtgtttcttatatagcagatggaatgaatttgaagttcccagggctgaggatccatgccttctttgtttctaagttatctttcccatagcttttcattatctttcatatgatccagtatatgttaaatatgtcctacatatacatttagacaaccaccatttgttaagtatttgctctaggacagagtttggatttgtttatgtttgctcaaaaggagacccatgggctctccagggtgcactgagtcaatctagtcctaaaaagcaatcttattattaactctgtatgacagaatcatgtctggaacttttgttttctgctttctgtcaagtataaacttcactttgatgctgtacttgcaaaatcacattttctttctggaaattccggcagtgtaccttgactgctagctaccctgtgccagaaaagcctcattcgttgtgcttgaacccttgaatgccaccagctgtcatcactacacagccctcctaagaggcttcctggaggtttcgagattcagatgccctgggagatcccagagtttcctttccctcttggccatattctggtgtcaatgacaaggagtaccttggctttgccacatgtcaaggctgaagaaacagtgtctccaacagagctccttgtgttatctgtttgtacatgtgcatttgtacagtaattggtgtgacagtgttctttgtgtgaattacaggcaagaattgtggctgagcaaggcacatagtctactcagtctattcctaagtcctaactcctccttgtggtgttggatttgtaaggcactttatcccttttgtctcatgtttcatcgtaaatggcataggcagagatgatacctaattctgcatttgattgtcactttttgtacctgcattaatttaataaaatattcttatttattttgttacttggtacaccagcatgtccattttcttgtttattttgtgtttaataaaatgttcagtttaacatcccagtggagaaagttaaaaaa

SEQ ID NO: 49 - DNA, 4972 bp, Homo sapiens
cacattgttctgatcatctgaagatcagctattagaagagaaagatcagttaagtcctttggacctgatcagcttgatacaagaactactgatttcaacttctttggcttaattctctcggaaacgatgaaatatacaagttatatcttggcttttcagctctgcatcgttttgggttctcttggctgttactgccaggacccatatgtaaaagaagcagaaaaccttaagaaatattttgtaagtatgactttttaatagtacttgtttgtggttgaaaatgactgaatatcgacttgctgtagcatctctgataggctgtcatctcttgtaggcagtcattttgagatttggtgttattttgttaattattgactagatgagttccttgactaaataatctagatattgttttaaccttctgctcagtttgtatagagacttaaaagggatttatgaattttccaaaagatgggcataatatgggtatgaagcataatgatgttaataattttgtggtgggaactcattcagttgtgatagtcaaggagtatgcagattgaaaaaaatgattggttattagtttttgacttctcagactctaaggtcaagattagcattaaaaaggtaataggaaatgtttacaaattaaagtcaaaaaggtccttaaagctttggcttaaaaaaataactgataggtgattttctccaaaaagtgatttcaacattctgcttctctatctatattacttgtgaagtattccggaacttcgttgctcactgggattttggaagaattatgattctggctaaggaatgtttaaaaattttaagtgaattttttgagtttcttttaaaattttattgatggttaatgaaaagtttttacattttaaatatttcattatttgtttaaaacttagctgttataattatagctgtcataataatattcagacattcacaattgattttattcttacaacacaaaatcaaatcacacacacacacacacacacacacacactcgcacatgtttggaactatcttttaaagctcgtataataataccctacaggaaggcacagtagatgtaatagaaacctgtaccattggggggcagtattttatagtggggtggctttgctgttttttgtttttgtattttttagcctagcttgaaaatactttctttagcttactatagtttttgggacctttggagtatcagctttgttgagctcatttgtgacattgcaatttaatggttatattgggaaataaaaaagctaaaagaacataatagtctttgtctatatctcacataagccttttgggaatacttattgttagaactaagcagaagagttgaaaaggaaatcagtgaatattgtcacatctgagttcaatgaaacttgaaatatatttttaaggcaatttatgggctaattgtaaaccaattttttctttttttttttttagaatgcaggtcattcagatgtagcggataatggaactcttttcttaggcattttgaagaattggaaagaggtaagctgaatattcccatttggctaattttcctgttgcttgctttctgatggataaattcacatcatcctctgtttgtgctctttccttccaaggagagtgacagaaaaataatgcagagccaaattgtctccttttacttcaaactttttaaaaactttaaagatgaccagagcatccaaaagagtgtggagaccatcaaggaagacatgaatgtcaagtttttcaatagcaacaaaaagaaacgagatgacttcgaaaagctgactaattattcggtgaggctatttaaattctttctttggtttcattgccgagggtcttgcaaagcatttattctccagaaagtagacattagctatttaacagttgctaaagctatgaactcaactcatggctgaaactctaccttactatttccattcgtgtttgggtgactttgcaaagccagtaagagaatcgctgaagtatgtaatgtagagaaatgctggcattgtaactattgcgtaaagacaggtgagttgacaaatccagtgaagaggaagtaggtgaggaagaagcggggagtactgagaagcagttctctcattgtcccttgctcatatgatggaaattctcttactttgaatgagaggctgtctgtcttaatggaaagagcagtgggaggagctgagaagatgtgtgttctcctcccaactcagccaccaaggaactgtgatgaatcacatggctggctggggctcagtttcctcatcttaaaaggaaactgttaggctcactgtataagtttgatgaccttctttgctccaaaactctacaatgcaaagaatagaaaatgagaatgagatagaagaaagctacagtctttgaataggtaccagggacaccccactgcaagtctctagccaacctatcagattgtactgcccaattagaagcaagaatggttgctgtttgtttgtttttagggaaaaatagatagaatttataccttatgaaaagattgttctatcaactctctatcaactttcagaatatctcagctggagaactccttagactcctaagtcttacctcatgaacttgtatctttaagttatggcttctataaacagaaagataacgttgaggcataaagacaaatcatgtttttcaaaatgttttctagaagacaaaggcctctagattcctttggggttgactttgatataaatgggctcaaatgagagggaccagggtcttcaagctagcatttgtgttcttaggatatgtgctcagctttcactattgctgggcctgcctctcactcctctcatgtaagcccccagaaacagaaaggagagacatggcaacaggtctcctttggttataaactagacactcagcacttgtttctaatccagtggtgcccctggcttactgttcagtcctggataagtctcttagtttcttggtgatgatttgaacattggaaagtaaaatctgtcacttgcaaacacacagcttgtcgaaaattttttctactctgcaggaactgggccttaaaaaaatgaaaaaaaatctgtggtttcttccttctggaagctacaaacctcctgtttcttgatgggcaatcttgagtgagctctattaattattattctctttggctcagttgctaagctattttatgcatgttatgccctttgacaattagtctttagctgtaatcccccagccatcctcagaaatgtggtgagtagccatagtgttcccaagattagaaaaaatgtaatggcagagccaagaggaaggtaaatggtccacattttatgaagcatcatctaaatggccctattggttagagtgaggagatgcaagtagttcaatttgcttgcctagaaggcagggtactggaaaagttgttgcaattcttaattttaaactttatatatcagtaagccatatataaatatgattgggggtgtttattttaaaatctattatggaaattgagagactgacctaatctgggagaaattaaaaattacagttttcactcgttttggatttggtgttttctagggtacctaacctagatcagtggttctcaaacttaggtggatgtcagaatcacctggggagcttagtgaatgcacagggcacagtccttccacttcatgcacctggatctctgaggtctttgacaggtttccggattaatctgctatgcacaacagtgagaatcattgacctatagttactcatttgatgcatacaggaaagactgaagtataaagtgatataattggtagattgatgatagagaggtcatagaaacagtctcatcctcctttagatgagaaaatagaagttcagagaggttaagtagctggctcaaggtcagaattattgcatgcatgagattcaaacccacctttttatgctgactccacaaccaggagtcttttcactatataatttcaagaattctatagaagtagatttaaagatatgtgatggactccaccacattatagcacaactagaaatgtaattgtaatttttagcttcaactgctgaagaagtaaatattgtatattaaggtaatacggtccattttttaaaggaatacttttattttcactgaccatcatgacattagcagaatatcctgatggcttatatgcctgaaattaattttgctcttttctttcccgataggtaactgacttgaatgtccaacgcaaagcaatacatgaactcatccaagtgatggctgaactgtcgccagcagctaaaacagggaagcgaaaaaggagtcagatgctgtttcgaggtcgaagagcatcccagtaatggttgtcctgcctgcaatatttgaattttaaatctaaatctatttattaatatttaacattatttatatggggaatatatttttagactcatcaatcaaataagtatttataatagcaacttttgtgtaatgaaaatgaatatctattaatatatgtattatttataattcctatatcctgtgactgtctcacttaatcctttgttttctgactaattaggcaaggctatgtgattacaaggctttatctcaggggccaactaggcagccaacctaagcaagatcccatgggttgtgtgtttatttcacttgatgatacaatgaacacttataagtgaagtgatactatccagttactgccggtttgaaaatatgcctgcaatctgagccagtgctttaatggcatgtcagacagaacttgaatgtgtcaggtgaccctgatgaaaacatagcatctcaggagatttcatgcctggtgcttccaaatattgttgacaactgtgactgtacccaaatggaaagtaactcatttgttaaaattatcaatatctaatatatatgaataaagtgtaagttcacaac

SEQ ID NO: 50 - DNA, 1240 bp, Homo sapiens
cacattgttctgatcatctgaagatcagctattagaagagaaagatcagttaagtcctttggacctgatcagcttgatacaagaactactgatttcaacttctttggcttaattctctcggaaacgatgaaatatacaagttatatcttggcttttcagctctgcatcgttttgggttctcttggctgttactgccaggacccatatgtaaaagaagcagaaaaccttaagaaatattttaatgcaggtcattcagatgtagcggataatggaactcttttcttaggcattttgaagaattggaaagaggagagtgacagaaaaataatgcagagccaaattgtctccttttacttcaaactttttaaaaactttaaagatgaccagagcatccaaaagagtgtggagaccatcaaggaagacatgaatgtcaagtttttcaatagcaacaaaaagaaacgagatgacttcgaaaagctgactaattattcggtaactgacttgaatgtccaacgcaaagcaatacatgaactcatccaagtgatggctgaactgtcgccagcagctaaaacagggaagcgaaaaaggagtcagatgctgtttcgaggtcgaagagcatcccagtaatggttgtcctgcctgcaatatttgaattttaaatctaaatctatttattaatatttaacattatttatatggggaatatatttttagactcatcaatcaaataagtatttataatagcaacttttgtgtaatgaaaatgaatatctattaatatatgtattatttataattcctatatcctgtgactgtctcacttaatcctttgttttctgactaattaggcaaggctatgtgattacaaggctttatctcaggggccaactaggcagccaacctaagcaagatcccatgggttgtgtgtttatttcacttgatgatacaatgaacacttataagtgaagtgatactatccagttactgccggtttgaaaatatgcctgcaatctgagccagtgctttaatggcatgtcagacagaacttgaatgtgtcaggtgaccctgatgaaaacatagcatctcaggagatttcatgcctggtgcttccaaatattgttgacaactgtgactgtacccaaatggaaagtaactcatttgttaaaattatcaatatctaatatatatgaataaagtgtaagttcacaacaaaaaaaaaaaaaaaaaaaaaaaaaaaaaa

SEQ ID NO: 51 - protein, 166 aa, Homo sapiens
MKYTSYILAFQLCIVLGSLGCYCQDPYVKEAENLKKYFNAGHSDVADNGTLFLGILKNWKEESDRKIMQSQIVSFYFKLFKNFKDDQSIQKSVETIKEDMNVKFFNSNKKKRDDFEKLTNYSVTDLNVQRKAIHELIQVMAELSPAAKTGKRKRSQMLFRGRRASQ

1. A method of determining the need of a cancer patient for a PD-L1 inhibitor cotherapy, (i) wherein therapy comprising a modulator of the HER2/neu (ErbB2) signaling pathway and a chemotherapeutic agent is contemplated for the patient or (ii) wherein the patient is undergoing therapy comprising a modulator of the HER2/neu (ErbB2) signaling pathway and a chemotherapeutic agent, the method comprising the steps of
a) measuring in vitro in a sample from said patient the expression level of Estrogen receptor (ER) and of programmed death ligand 1 (PD-L1),
b) determining a patient as being in need of a PD-L1 inhibitor cotherapy if a low or absent ER expression level and an expression level of programmed death ligand 1 (PD-L1) that is increased in comparison to a control is measured in step (a).

2. A method of treating a cancer in a cancer patient for whom therapy comprising a modulator of the HER2/neu (ErbB2) signaling pathway and a chemotherapeutic agent is contemplated, the method comprising selecting a cancer patient whose cancer is determined to have a low or absent ER expression level and to have an increased expression level of programmed death ligand 1 (PD-L1) in comparison to a control, and administering to the patient an effective amount of a modulator of the HER2/neu (ErbB2) signaling pathway, of a chemotherapeutic agent and of a programmed death ligand 1 (PD-L1) inhibitor.

3. A method of treating a cancer in a cancer patient who is undergoing therapy comprising a modulator of the HER2/neu (ErbB2) signaling pathway and a chemotherapeutic agent, the method comprising selecting a cancer patient whose cancer is determined to have a low or absent ER expression level and to have an increased expression level of programmed death ligand 1 (PD-L1) in comparison to a control, and administering to the patient an effective amount of a programmed death ligand 1 (PD-L1) inhibitor.

4. A pharmaceutical composition comprising a modulator of the HER2/neu (ErbB2) signaling pathway, and an inhibitor of programmed death ligand 1 (PD-L1) for use in the treatment of cancer, whereby said cancer is determined to have a low or absent ER expression level and to have an increased expression level of programmed death ligand 1 (PD-L1) in comparison to a control.

5. The pharmaceutical composition for use in the treatment of cancer of claim 4, further comprising a chemotherapeutic agent.

6. The method of claim 1, further comprising measuring in vitro in a sample from said patient the expression level of interferon-gamma (IFNγ) and determining a patient as being in need of a PD-L1 inhibitor cotherapy if an expression level of interferon-gamma (IFNγ) that is decreased in comparison to a control is measured.

7. The pharmaceutical composition of claim 4, whereby said cancer is determined to have a decreased expression level of interferon-gamma (IFNγ) in comparison to the control.

8. The method of claim 1, wherein the ER expression level is ER(−).

9. The method of claim 1, wherein said modulator of the HER2/neu (ErbB2) signaling pathway is an inhibitor of HER shedding.

10. The method of claim 9, wherein said inhibitor of HER shedding is a HER2 shedding inhibitor.

11. The method of claim 9, wherein said inhibitor of HER shedding inhibits HER heterodimerization or HER homodimerization.

12. The method of claim 9, wherein said inhibitor of HER shedding is a HER antibody.

13. The method of claim 12, wherein said HER antibody binds to a HER receptor selected from the group consisting of EGFR, HER2 and HER3.

14. The method of claim 13, wherein said antibody binds to HER2.

15. The method of claim 14, wherein said HER2 antibody binds to sub-domain IV of the HER2 extracellular domain.

16. The method of claim 12, wherein said HER2 antibody is Herceptin/Trastuzumab.

17. The method of claim 1, wherein said modulator of the HER2/neu (ErbB2) signaling pathway is a HER dimerization/signaling inhibitor.

18. The method of claim 17, wherein said HER dimerization inhibitor is a HER2 dimerization inhibitor.

19. The method of claim 17, wherein said HER dimerization inhibitor inhibits HER heterodimerization or HER homodimerization.

20. The method of claim 17, wherein said HER dimerization inhibitor is a anti HER antibody.

21. The method of claim 20, wherein said HER antibody binds to a HER receptor selected from the group consisting of EGFR, HER2 and HER3.

22. The method of claim 21, wherein said antibody binds to HER2.

23. The method of claim 22, wherein said anti HER2 antibody binds to domain II of HER2 extracellular domain.

24. The method of claim 23, wherein said antibody binds to a junction between domains I, II and III of HER2 extracellular domain.

25. The method of any claim 20, wherein said anti HER2 antibody is Pertuzumab.

26. The method of claim 1, wherein said chemotherapeutic agent is taxol or a taxol derivative.

27. The method of claim 26, wherein said taxol derivative is dodetaxel.

28. The method of claim 1, wherein said inhibitor of programmed death ligand 1 (PD-L1) is an antibody specifically binding to PD-L1 (anti-PD-L1 antibody).

29. The method of claim 28, wherein said antibody comprises an heavy chain variable region polypeptide comprising an HVR-H1, HVR-H2 and HVR-H3 sequence, wherein:
(SEQ ID NO: 1)
(a) the HVR-H1 sequence is GFTFSX1SWIH;
(SEQ ID NO: 2)
(b) the HVR-H2 sequence is AWIX2PYGGSX3YYADSVKG;
(SEQ ID NO: 3)
(c) the HVR-H3 sequence is RHWPGGFDY;
further wherein: X1 is D or G; X2 is S or L; X3 is T or S.

30. The method of claim 29, wherein X1 is D; X2 is S and X3 is T.

31. The method of claim 29, wherein said polypeptide further comprises variable region heavy chain framework sequences juxtaposed between the HVRs according to the formula: (HC-FR1)-(HVR-H1)-(HC-FR2)-(HVR-H2)-(HC-FR3)-(HVR-H3)-(HC-FR4).

32. The method of claim 31, wherein the framework sequences are derived from human consensus framework sequences.

33. The method of claim 32, wherein the framework sequences are VH subgroup III consensus framework.

34. The method of claim 33, wherein one or more of the framework sequences is the following:
(SEQ ID NO: 4)
HC-FR1 is [sequence omitted]
(SEQ ID NO: 5)
HC-FR2 is WVRQAPGKGLEWV
(SEQ ID NO: 6)
HC-FR3 is RFTISADTSKNTAYLQMNSLRAEDTAVYYCAR
(SEQ ID NO: 7)
HC-FR4 is WGQGTLVTVSA.

35. The method of claim 29, wherein said heavy chain polypeptide is in combination with a variable region light chain comprising an HVR-L1, HVR-L2 and HVR-L3, wherein:
(SEQ ID NOs: 8)
(a) the HVR-L1 sequence is RASQX4X5X6TX7X8A;
(SEQ ID NOs: 9)
(b) the HVR-L2 sequence is SASX9LX10S,;
and
(SEQ ID NOs: 10)
(c) the HVR-L3 sequence is QQX11X12X13X14PX15T;
further wherein: X4 is D or V; X5 is V or I; X6 is S or N; X7 is A or F; X8 is V or L; X9 is F or T; X10 is Y or A; X11 is Y, G, F, or S; X12 is L, Y, F or W; X13 is Y, N, A, T, G, F or I; X14 is H, V, P, T or I; X15 is A, W, R, P or T.

36. The method of claim 35, wherein X4 is D; X5 is V; X6 is S; X7 is A; X8 is V; X9 is F; X10 is Y; X11 is Y; X12 is L; X13 is Y; X14 is H; X15 is A.

37. The method of claim 35, wherein said polypeptide further comprises variable region light chain framework sequences juxtaposed between the HVRs according to the formula: (LC-FR1)-(HVR-L1)-(LC-FR2)-(HVR-L2)-(LC-FR3)-(HVR-L3)-(LC-FR4).

38. The method of claim 37 wherein the framework sequences are derived from human consensus framework sequences.

39. The method of claim 37, wherein the framework sequences are VL kappa I consensus framework.

40. The method of claim 39, wherein one or more of the framework sequences is the following:
(SEQ ID NO: 11)
LC-FR1 is DIQMTQSPSSLSASVGDRVTITC;
(SEQ ID NO: 12)
LC-FR2 is WYQQKPGKAPKLLIY;
(SEQ ID NO: 13)
LC-FR3 is GVPSRFSGSGSGTDFTLTISSLQPEDFATYYC;
(SEQ ID NO: 14)
LC-FR4 is FGQGTKVEIKR.

41. The method of claim 29, wherein said anti-PD-L1 antibody comprises a heavy chain and a light chain variable region sequence, wherein:
(a) the heavy chain comprises an HVR-H1, HVR-H2 and HVR-H3, wherein further:
(SEQ ID NO: 1)
(i) the HVR-H1 sequence is GFTFSX1SWIH;
(SEQ ID NO: 2)
(ii) the HVR-H2 sequence is AWIX2PYGGSX3YYADSVKG;
(SEQ ID NO: 3)
(iii) the HVR-H3 sequence is RHWPGGFDY,;
and
(b) the light chain comprises an HVR-L1, HVR-L2 and HVR-L3, wherein further:
(SEQ ID NOs: 8)
(iv) the HVR-L1 sequence is RASQX4X5X6TX7X8A;
(SEQ ID NOs: 9)
(v) the HVR-L2 sequence is SASX9LX10S;
(SEQ ID NOs: 10)
(vi) the HVR-L3 sequence is QQX11X12X13X14PX15T;
wherein: X1 is D or G; X2 is S or L; X3 is T or S; X4 may be D or V; X5 may be V or I; X6 may be S or N; X7 may be A or F; X8 may be V or L; X9 may be F or T; X10 may be Y or A; X11 may be Y, G, F, or S; X12 may be L, Y, F or W; X13 may be Y, N, A, T, G, F or I; X14 may be H, V, P, T or I; X15 may be A, W, R, P or T.

42. The method of claim 41, wherein X1 is D; X2 is S and X3 is T.

43. The method of claim 41, wherein X4=D, X5=V, X6=S, X7=A and X8=V, X9=F, and X10=Y, X11=Y, X12=L, X13=Y, X14=H and X15=A.

44. The method of claim 41, wherein X1=D, X2=S and X3=T, X4=D, X5=V, X6=S, X7=A and X8=V, X9=F, and X10=Y, X11=Y, X12=L, X13=Y, X14=H and X15=A.

45. The method of claim 41, wherein the antibody further comprises
(a) variable region heavy chain framework sequences juxtaposed between the HVRs according to the formula: (HC-FR1)-(HVR-H1)-(HC-FR2)-(HVR-H2)-(HC-FR3)-(HVR-H3)-(HC-FR4), and
(b) variable region light chain framework sequences juxtaposed between the HVRs according to the formula: (LC-FR1)-(HVR-L1)-(LC-FR2)-(HVR-L2)-(LC-FR3)-(HVR-L3)-(LC-FR4).

46. The method of claim 45, wherein the framework sequences are derived from human consensus framework sequences.

47. The method of claim 46, wherein the variable region heavy chain framework sequences are VH subgroup III consensus framework.

48. The method of claim 47, wherein one or more of the framework sequences is the following:
(SEQ ID NO: 4)
HC-FR1 is [sequence omitted];
(SEQ ID NO: 5)
HC-FR2 is WVRQAPGKGLEWV;
(SEQ ID NO: 6)
HC-FR3 is RFTISADTSKNTAYLQMNSLRAEDTAVYYCAR;
(SEQ ID NO: 7)
HC-FR4 is WGQGTLVTVSA.

49. The method of claim 46, wherein the variable region light chain framework sequences are VL kappa I consensus framework.

50. The method of claim 49, wherein one or more of the framework sequences is the following:
(SEQ ID NO: 11)
LC-FR1 is DIQMTQSPSSLSASVGDRVTITC;
(SEQ ID NO: 12)
LC-FR2 is WYQQKPGKAPKLLIY;
(SEQ ID NO: 13)
LC-FR3 is GVPSRFSGSGSGTDFTLTISSLQPEDFATYYC,;
and
(SEQ ID NO: 14)
LC-FR4 is FGQGTKVEIKR.

51. The method of claim 46, wherein:
(a) the variable heavy chain framework sequences are the following:
(SEQ ID NO: 4)
(i) HC-FR1 is [sequence omitted];
(SEQ ID NO: 5)
(ii) HC-FR2 is WVRQAPGKGLEWV;
(SEQ ID NO: 6)
(iii) HC-FR3 is RFTISADTSKNTAYLQMNSLRAEDTAVYYCAR;
(SEQ ID NO: 7)
(iv) HC-FR4 is WGQGTLVTVSA;;
and
(b) the variable light chain framework sequences are the following:
(SEQ ID NO: 11)
(i) LC-FR1 is DIQMTQSPSSLSASVGDRVTITC;
(SEQ ID NO: 12)
(ii) LC-FR2 is WYQQKPGKAPKLLIY;
(SEQ ID NO: 13)
(iii) LC-FR3 is GVPSRFSGSGSGTDFTLTISSLQPEDFATYYC;
(SEQ ID NO: 14)
(iv) LC-FR4 is FGQGTKVEIKR.

52. The method of claim 51, wherein the antibody further comprises a human constant region.

53. The method of claim 52, wherein the constant region is selected from the group consisting of IgG1, IgG2, IgG3 and IgG4.

54. The method of claim 53, wherein the constant region is IgG1.

55. The method of claim 51, wherein the antibody further comprises murine constant region.

56. The method of claim 55, wherein the constant region is selected from the group consisting of IgG1, IgG2A, IgG2B and IgG3.

57. The method of claim 56, wherein the constant region is IgG2A.

58. The method of claim 53, wherein said antibody has reduced or minimal effector function.

59. The method of claim 58, wherein the minimal effector function results from an effector-less Fc mutation.

60. The method of claim 59, wherein the effector-less Fc mutation is N297A.

61. The method of claim 59, wherein the effector-less Fc mutation is D265A/N297A.

62. The method of claim 58, wherein the minimal effector function results from aglycosylation.

63. The method of claim 29, wherein said antibody comprises a heavy chain and a light chain variable region sequence, wherein:
(a) the heavy chain comprises an HVR-H1, HVR-H2 and an HVR-H3, having at least 85% overall sequence identity to GFTFSDSWIH (SEQ ID NO:15), AWISPYGGSTYYADSVKG (SEQ ID NO:16) and RHWPGGFDY (SEQ ID NO:3), respectively, and
(b) the light chain comprises an HVR-L1, HVR-L2 and an HVR-L3, having at least 85% overall sequence identity to RASQDVSTAVA (SEQ ID NO:17), SASFLYS (SEQ ID NO:18) and QQYLYHPAT (SEQ ID NO:19), respectively.

64. The method of claim 63, wherein said sequence identity is at least 90%.

65. The method of claim 64, wherein said antibody further comprises:
(a) variable region heavy chain (VH) framework sequences juxtaposed between the HVRs according to the formula: (HC-FR1)-(HVR-H1)-(HC-FR2)-(HVR-H2)-(HC-FR3)-(HVR-H3)-(HC-FR4), and
(b) variable region light chain (VL) framework sequences juxtaposed between the HVRs according to the formula: (LC-FR1)-(HVR-L1)-(LC-FR2)-(HVR-L2)-(LC-FR3)-(HVR-L3)-(LC-FR4).

66. The method of claim 65, wherein said antibody further comprises a VH and VL framework region derived from a human consensus sequence.

67. The method of claim 66, wherein the VH framework sequence is derived from a Kabat subgroup I, II, or III sequence.

68. The method of claim 67, wherein the VH framework sequence is a Kabat subgroup III consensus framework sequence.

69. The method of claim 68, wherein the VH framework sequences are the following:
(SEQ ID NO: 4)
HC-FR1 is [sequence omitted];
(SEQ ID NO: 5)
HC-FR2 is WVRQAPGKGLEWV;
(SEQ ID NO: 6)
HC-FR3 is RFTISADTSKNTAYLQMNSLRAEDTAVYYCAR;
(SEQ ID NO: 7)
HC-FR4 is WGQGTLVTVSA.

70. The method of claim 66, wherein the VL framework sequence is derived from a Kabat kappa I, II, III or IV subgroup sequence.

71. The method of claim 70, wherein the the VL framework sequence is a Kabat kappa I consensus framework sequence.

72. The method of claim 71, wherein the VL framework sequences are the following:
(SEQ ID NO: 11)
LC-FR1 is DIQMTQSPSSLSASVGDRVTITC;
(SEQ ID NO: 12)
LC-FR2 is WYQQKPGKAPKLLIY;
(SEQ ID NO: 13)
LC-FR3 is GVPSRFSGSGSGTDFTLTISSLQPEDFATYYC;
(SEQ ID NO: 14)
LC-FR4 is FGQGTKVEIKR.

73. The method of claim 29, wherein said antibody comprises a heavy chain and a light chain variable region sequence, wherein:
(a) the heavy chain sequence has at least 85% sequence identity to the heavy chain sequence: EVQLVESGGGLVQPGGSLRLSCAASGFTFSDSWIHWVRQAPG KGLEWVAWISPYGGSTYYADSVKGRFTISADTSKNTAYLQMNSLRAEDTA VYYCARRHWPGGFDYWGQGTLVTVSA (SEQ ID NO:20), and
(b) the light chain sequence has at least 85% sequence identity to the light chain sequence: DIQMTQSPSSLSASVGDRVTITCRASQDVSTAVAWYQQKPGK APKLLIYSASFLYSGVPSRFSGSGSGTDFTLTISSLQPEDFATYYCQQYLYH PATFGQGTKVEIKR (SEQ ID NO:21).

74. The method of claim 73, wherein the sequence identity is at least 90%.

75. The method of claim 29, wherein said antibody comprises a heavy chain and light chain variable region sequence, wherein:
(a) the heavy chain comprises the sequence: EVQLVESGGGLVQPGGSLRLS CAASGFTFSDSWIHWVRQAPGKGLEWVAWISPYGGSTYYADSVKGRFTIS ADTSKNTAYLQMNSLRAEDTAVYYCARRHWPGGFDYWGQGTLVTVSA (SEQ ID NO:20), and
(b) the light chain comprises the sequence: DIQMTQSPSSLSASVGDRVTITC RASQDVSTAVAWYQQKPGKAPKLLIYSASFLYSGVPSRFSGSGSGTDFTLT ISSLQPEDFATYYCQQYLYHPATFGQGTKVEIKR (SEQ ID NO:21).

76. The method of claim 1, wherein said cancer is a solid cancer.

77. The method of claim 76, wherein said solid cancer is breast cancer or gastric cancer.

78. The method of claim 76, wherein said solid cancer is breast cancer.

79. The method of claim 1, wherein the expression level of PD-L1 is higher or equal to 5.3 determined by routine methods like Affymetrix.

80. The method of claim 1, wherein the expression level of PD-L1 is the mRNA expression level.

81. The method of claim 80, wherein the mRNA expression level of PD-L1 is assessed by in situ hybridization, micro-arrays, or RealTime PCR.

82. The method of claim 1, wherein the expression level of PD-L1 is the protein expression level.

83. The method of claim 82, wherein said protein expression level of PD-L1 is assessed by immunoassay, gel- or blot-based methods, IHC, mass spectrometry, flow cytometry, or FACS.

84. The method of claim 1, wherein the patient to be treated is a human.

85. Use of a nucleic acid or antibody capable of detecting the expression level of ER, PD-L1 and, optionally, IFNγ for determining a patient's need for PD-L1 inhibitor cotherapy in combination with a modulator of the HER2/neu (ErbB2) signaling pathway and a chemotherapeutic agent.

86. A kit useful for carrying out the method of claim 1, comprising a nucleic acid or an antibody capable of detecting the expression level of ER, PD-L1 and, optionally, IFNγ.

87. The method of claim 1, wherein said modulator of the HER2/neu (ErbB2) signaling pathway, said chemotherapeutic agent and said inhibitor of programmed death ligand 1 (PD-L1) are to be administered in a neoadjuvant setting or adjuvant setting or metastatic setting.

88. A method for treating cancer comprising administering an effective amount of a modulator of the HER2/neu (ErbB2) signaling pathway, a chemotherapeutic agent and an inhibitor of programmed death ligand 1 (PD-L1) to a subject in need thereof.
